(19) United States
(12) Patent Application Publication
(10) Pub. No.: US 2023/0313189 A1
(43) Pub. Date: Oct. 5, 2023

(54) COMPLEMENT COMPONENT 4 INHIBITORS FOR TREATING NEUROLOGICAL DISEASES, AND RELATED COMPOSITONS, SYSTEMS AND METHODS OF USING SAME

(71) Applicant: Genentech, Inc., South San Francisco, CA (US)

(72) Inventors: Alexander MUNK, Ishoj (DK); Helene M. GYLLING, Copenhagen (DK); Jesse Eric HANSON, Belmont, CA (US); Lukasz J. KIELPINSKI, Hørsholm (DK)

(73) Assignee: Genentech, Inc., South San Francisco, CA (US)

(21) Appl. No.: 18/054,116

(22) Filed: Nov. 9, 2022

Related U.S. Application Data
(63) Continuation of application No. PCT/US2021/031265, filed on May 7, 2021.
(60) Provisional application No. 63/023,103, filed on May 11, 2020.

(51) Int. Cl. C12N 15/113; C12Q 1/6883

(52) U.S. Cl. CPC C12N 15/113; C12Q 1/6883; C12N 2310/11; C12N 2310/3231; C12N 2310/315; C12N 2310/341; C12N 2310/3341

(57) ABSTRACT

The present invention relates to complement component 4 (C4) inhibitors for use in treatment of a neurological disease. The invention in particular relates to the use of C4 inhibitors for down-regulation of C4 expression. The invention also relates to nucleic acid molecules, which are complementary to C4A and/or C4B and capable of reducing the level of an C4A and/or C4B mRNA. Also comprised in the present invention is a pharmaceutical composition and its use in the treatment of a neurological disease.

### CROSS-REFERENCE TO RELATED APPLICATIONS

[0001] This application relates to U.S. Provisional application filed May 11, 2020, entitled “Complement Component C1R Inhibitors For Treating A Neurological Disease, And Related Compositions, Systems And Methods Of Using Same” and US Provisional application filed May 11, 2020, entitled “Complement Component C1S Inhibitors For Treating A Neurological Disease, And Related Compositions, Systems And Methods Of Using Same,” the contents of which are both incorporated herein by reference in their entireties. This application claims priority to U.S. Provisional Application No. 63/023,103, filed May 11, 2020, entitled “Complement Component C4 Inhibitors For Treating A Neurological Disease, And Related Compositions, Systems And Methods Of Using Same,” the contents of which are incorporated herein by reference in its entirety.

### SEQUENCE LISTING

[0002] This application contains a Sequence Listing, which has been submitted electronically in XML format and is hereby incorporated by reference in its entirety. Said XML copy, created on May 3, 2023, is named P36089-US-1_SL.xml and is 3,268,941 bytes in size.

### FIELD OF INVENTION

[0003] The present invention relates to complement component 4 (C4) inhibitors for use in treatment of neurological diseases. The invention in particular relates to the use of C4 inhibitors for down-regulation of C4 expression. The invention also relates to nucleic acid molecules, which are complementary to C4A and/or C4B and capable of reducing the level of an C4A and/or C4B mRNA. Also comprised in the present invention is a pharmaceutical composition and its use in the treatment of neurological diseases.

### BACKGROUND

[0004] The complement system is a part of the innate immune system that enhances the clearance of microbes or damaged cells by phagocytes and promotes inflammation. The complement system also participates in synaptic pruning in the brain, with the classical pathway of the complement system mediating synapse removal. This process involves initiation of the classical pathway by the complement component 1 (C0) complex (consisting of C1Q, C1S and C1R), leading to cleavage of complement component 2 (C2) and complement component 4 (C4), which in turn lead to cleavage of complement component 3 (C3) followed by engulfment of synapses by microglia cells, Beyond roles in normal brain circuitry refinement during early development, it is well established that aberrant activity of the classical complement pathway can mediate synapse loss and neurodegeneration in various neurological diseases. Observations of elevated complement levels in patient samples and beneficial effects of reducing or eliminating complement components in mouse models have identified a damaging role for complement in conditions including, Alzheimer's disease, frontotemporal dementia, multiple sclerosis, amyotrophic lateral sclerosis, Huntington's disease, Parkinson's disease, virus-induced cognitive impairment, glaucoma, macular degeneration, myasthenia gravis, Guillain-Barré syndrome, neuromyelitis optica, central nervous system lupus erythematosus and schizophrenia.

[0005] There remains a need in the art for therapeutic and prognostic agents to address such conditions. The present invention meets these and other needs.

### OBJECTIVE OF THE INVENTION

[0006] The present invention provides nucleic acid inhibitors of complement component 4 (C4) which may be used both in vivo and in vitro for down-regulation of C4 expression and for the prophylactic and therapeutic intervention in neurological diseases. The present invention further identifies novel nucleic acid molecules, such as antisense oligonucleotides, which are capable of inhibiting the expression of C4 in vitro and in vivo.

### SUMMARY OF INVENTION

[0007] The present invention relates to oligonucleotides targeting a nucleic acid and capable of modulating the expression of C4, useful, for example, to treat or prevent diseases related to the functioning of C4.

[0008] Accordingly, in a first aspect, the invention provides a C4 inhibitor for use in the treatment and/or prevention of neurological diseases, such as tauopathies or schizophrenia, in particular, a C4 inhibitor is capable of reducing the amount of C4, such as C4 mRNA and/or C4 protein. Such an inhibitor is advantageously a nucleic acid molecule of 12 to 60 nucleotides in length, which is capable of reducing C4 mRNA levels. In some embodiments, C4 is C4A and/or C4B.

[0009] In a further aspect, the invention relates to a nucleic acid molecule of 12-60 nucleotides, such as of 12-30 nucleotides, comprising a contiguous nucleotide sequence of at least 10 nucleotides, in particular of 16 to 20 nucleotides, which is at least 90% complementary, such as 90-95%, 95-98%, or fully complementary to a mammalian C4, e.g. a human C4A and/or C4B, a mouse C4b and/or C4a or a cynomolgus monkey C4. Such a nucleic acid molecule is capable of inhibiting the expression of C4A and/or C4B in a cell expressing C4A and/or C4B. The inhibition of C4A and/or C4B expression allows for a reduction of the amount of C4A and/or C4B protein present in the cell. The nucleic acid molecule can be selected from a single stranded antisense oligonucleotide, a double stranded siRNA molecule or a shRNA nucleic acid molecule (in particular chemically produced shRNA molecules).

[0010] A further aspect of the present invention relates to single stranded antisense oligonucleotides or siRNAs that inhibit the expression and/or activity of C4A and/or C4B. In particular, modified antisense oligonucleotides or modified siRNAs comprising one or more 2′ sugar modified nucleoside(s) and one or more phosphorothioate linkage(s), which reduce C4A and/or C4B mRNA are advantageous.

[0011] In a further aspect, the invention provides pharmaceutical compositions comprising the C4 inhibitor of the present invention, such as the antisense oligonucleotide or siRNA of the invention and a pharmaceutically acceptable excipient.

[0012] In some embodiments, the C4 inhibitor is selected from the group consisting of a C4A inhibitor, a C4B inhibitor and a pan-C4 inhibitor.

[0013] In a further aspect, the invention provides methods for in vivo or in vitro modulation of C4A and/or C4B expression in a target cell, which is expressing C4A and/or C4B, by administering a C4 inhibitor of the present invention, such as an antisense oligonucleotide or composition of the invention in an effective amount to said cell. In some embodiments, the C4A and/or C4B expression is reduced by at least 50%, e.g., 50-60%; or at least 60%, e.g., 60-70%; or at least 70%, e.g., 70-80%; or at least 80%, e.g., 80-90%; or at least 90%, e.g., 90-95%, in the target cell compared to the level without any treatment or treated with a control.

[0014] In a further aspect, the invention provides methods for treating or preventing a disease, disorder or dysfunction associated with in vivo activity of C4 comprising administering a therapeutically or prophylactically effective amount of the C4 inhibitor of the present invention, such as the antisense oligonucleotide or siRNA of the invention to a subject suffering from or susceptible to the disease, disorder or dysfunction.

[0015] In some embodiments, the C4 inhibitor is selected from the group consisting of a C4A inhibitor, a C4B inhibitor and a pan-C4 inhibitor.

### Definitions

[0016] Compound

[0017] Herein, the term “compound”, with respect to a compound of the invention, means any molecule capable of inhibition C4 expression or activity. Particular compounds of the invention are nucleic acid molecules, such as RNAi molecules or antisense oligonucleotides according to the invention or any conjugate comprising such a nucleic acid molecule. For example, herein the compound may be a nucleic acid molecule targeting C4A and/or C4B, in particular an antisense oligonucleotide or a siRNA. In some embodiments, the compound is herein also referred to as an “inhibitor” or a “C4 inhibitor”. In some embodiments, the C4 inhibitor is selected from the group consisting of a C4A inhibitor, a C4B inhibitor and a pan-C4 inhibitor. The term “C4A inhibitor” as used herein designates a molecule capable of specifically inhibiting C4A expression or activity. The term “C4B inhibitor” as used herein designates a molecule capable of specifically inhibiting C4B expression or activity. The term “pan-C4 inhibitor” as used herein designates a molecule capable of inhibiting both, C4A and C4B expression or activity.

[0018] Oligonucleotide

[0019] The term “oligonucleotide” as used herein is defined as it is generally understood by the skilled person, such as, as a molecule comprising two or more covalently linked nucleosides. An oligonucleotide is also referred to herein as a “nucleic acid” or “nucleic acid molecule”. Such covalently bound nucleosides may also be referred to as nucleic acid molecules or oligomers. The oligonucleotides referred to in the description and claims are generally therapeutic oligonucleotides below 70 nucleotides in length. The oligonucleotide may be or comprise a single stranded antisense oligonucleotide, or may be another nucleic acid molecule, such as a CRISPR RNA, an siRNA, an shRNA, an aptamer, or a ribozyme. Therapeutic oligonucleotide molecules are commonly made in the laboratory by solid-phase chemical synthesis followed by purification and isolation. shRNA's are often delivered to cells using lentiviral vectors from which they are then transcribed to produce single stranded RNA that will form a stem loop (hairpin) RNA structure capable of interacting with RNA interference machinery (including the RNA-induced silencing complex (RISC)). In an embodiment of the present invention, the shRNA is a chemically produced shRNA molecule (not relying on cell-based expression from plasmids or viruses). When referring to a sequence of the oligonucleotide, reference is made to the sequence or order of nucleobase moieties, or modifications thereof, of the covalently linked nucleotides or nucleosides. Generally, the oligonucleotide of the invention is man-made, and is chemically synthesized, and is typically purified or isolated. Although in some embodiments, the oligonucleotide of the invention is an shRNA transcribed from a vector upon entry into the target cell. The oligonucleotide of the invention may comprise one or more modified nucleosides or nucleotides.

[0020] In some embodiments, the term oligonucleotide of the invention also includes pharmaceutically acceptable salts, esters, solvates and prodrugs thereof.

[0021] In some embodiments, the oligonucleotide of the invention comprises or consists of 10 to 70 nucleotides in length, such as from 12 to 60, such as from 13 to 50, such as from 14 to 40, such as from 15 to 30, such as from 16 to 25, such as from 16 to 22, such as from 16 to 20 contiguous nucleotides in length. Accordingly, the oligonucleotide of the present invention, in some embodiments, may have a length of 12 to 25 nucleotides. Alternatively, the oligonucleotide of the present invention, in some embodiments, may have a length of 15 to 21 nucleotides.

[0022] In some embodiments, the oligonucleotide, or a contiguous nucleotide sequence thereof, comprises or consists of 24 or less nucleotides, such as 22, such as 20 or less nucleotides, such as 14, 15, 16, 17, 18, 19, 20 or 21 nucleotides. It is to be understood that any range given herein includes the range endpoints. Accordingly, if a nucleic acid molecule is said to include from 15 to 20 nucleotides, both 15 and 20 nucleotide lengths are included.

[0023] In some embodiments, the contiguous nucleotide sequence comprises or consists of 12, 13, 14, 15, 16, 17, 18, 19, 20, 21 or 22 contiguous nucleotides in length.

[0024] The oligonucleotide(s) can modulate the expression of a target nucleic acid in a mammal or in a mammalian cell. In some embodiments, the nucleic acid molecules, such as for siRNAs, shRNAs and antisense oligonucleotides inhibit expression of a target nucleic acid(s).

[0025] In one embodiment of the invention, the oligonucleotide is selected from an RNAi agent, such as an siRNA or shRNA. In another embodiment, the oligonucleotide is a single stranded antisense oligonucleotide, such as a high affinity modified antisense oligonucleotide interacting with RNase H.

[0026] In some embodiments, the oligonucleotide of the invention may comprise one or more modified nucleosides or nucleotides, such as 2′ sugar modified nucleosides.

[0027] In some embodiments, the oligonucleotide comprises phosphorothioate internucleoside linkages.

[0028] A library of oligonucleotides is to be understood as a collection of different oligonucleotides. The purpose of the library of oligonucleotides can vary. In some embodiments, the library of oligonucleotides is composed of oligonucleotides with overlapping nucleobase sequence targeting one or more mammalian C4A and/or C4B target nucleic acids, designed for the purpose of identifying potent sequences, e.g., the most potent sequence, within the library of oligonucleotides. In some embodiments, the library of oligonucleotides is a library of oligonucleotide design variants (child nucleic acid molecules) of a parent or ancestral oligonucleotide, wherein the oligonucleotide design variants retain a core nucleobase sequence of the parent nucleic acid molecule, e.g., a conserved sequence of the parent.

[0029] Antisense Oligonucleotides

[0030] The term “antisense oligonucleotide” or “ASO” as used herein is defined as oligonucleotides capable of hybridizing to a target nucleic acid, in particular to a contiguous sequence on a target nucleic acid, e.g., to modulate expression of the corresponding target gene. Generally, nucleic acid molecules of the invention are antisense nucleic acids. The antisense oligonucleotides are not essentially double stranded and need not be siRNAs or shRNAs. Preferably, the antisense oligonucleotides of the present invention are single stranded. It is understood that single stranded oligonucleotides of the present invention can form hairpins or intermolecular duplex structures (duplex between two molecules of the same oligonucleotide), e.g., where the degree of intra or inter self-complementarity is less than 50% across of the full length of the oligonucleotide.

[0031] Advantageously, in some embodiments, the single stranded antisense oligonucleotide of the invention does not contain RNA nucleosides, since this will decrease nuclease resistance.

[0032] Advantageously, in some embodiments, the oligonucleotide of the invention comprises one or more modified nucleosides or nucleotides, such as 2′ sugar modified nucleosides. Furthermore, it is advantageous that, some, most, or all of the nucleosides, which are not modified, are DNA nucleosides, e.g., 50%, 75%, 95%, or 100% of the nucleosides which are not modified are DNA nucleosides.

[0033] RNAi Molecules

[0034] Herein, the term “RNA interference (RNAi) molecule” refers to short double-stranded oligonucleotide containing RNA nucleosides and which mediates targeted cleavage of an RNA transcript, e.g., via the RNA-induced silencing complex (RISC), where they interact with the catalytic RISC component argonaute. The RNAi molecule modulates, e.g., inhibits, the expression of the target nucleic acid in a cell, e.g. a cell within a subject, such as a mammalian subject. RNAi molecules includes single stranded RNAi molecules (Lima at al 2012 Cell 150: 883) and double stranded molecules, e.g., siRNAs or partially double-stranded molecules, as well as short hairpin RNAs (shRNAs). In some embodiments of the invention, the oligonucleotide of the invention or contiguous nucleotide sequence thereof is a RNAi agent, such as a siRNA.

[0035] siRNA

[0036] The term “small interfering ribonucleic acid” or “siRNA” refers to a small interfering ribonucleic acid RNAi molecule that generally interferes with the expression of an mRNA. The term refers to a class of double-stranded RNA molecules, also known in the art as short interfering RNA or silencing RNA. siRNAs typically comprise a sense strand (also referred to as a passenger strand) and an antisense strand (also referred to as the guide strand), wherein one or both strands are of 17 to 30 nucleotides in length, typically 19 to 25 nucleosides in length, wherein the antisense strand is complementary, such as at least 90%, e.g., 90-95% complementary, or such as fully complementary, to the target nucleic acid (suitably a mature mRNA sequence), and the sense strand is complementary to the antisense strand so that the sense strand and antisense strand form a duplex or duplex region. siRNA strands may form a blunt ended duplex, or advantageously the sense and/or antisense strand 3′ end may form a 3′ overhang of, e.g. 1, 2, or 3 nucleosides (e.g., to resemble the product produced by Dicer, which forms the RISC substrate in vivo. Effective extended forms of Dicer substrates have been described in U.S. Pat. Nos. 8,349,809 and 8,513,207, hereby incorporated by reference. In some embodiments, both the sense strand and antisense strand have a 2nt 3′ overhang. The duplex region may therefore be, for example 17 to 25 nucleotides in length, such as 21 to 23 nucleotide in length.

[0037] Once inside a cell the antisense strand can be incorporated into the RISC complex, which mediate target degradation or target inhibition of the target nucleic acid. siRNAs typically comprise modified nucleosides in addition to RNA nucleosides. In one embodiment, the siRNA molecule may be chemically modified using modified internucleotide linkages and 2′ sugar modified nucleosides, such as 2′-4′ bicyclic ribose modified nucleosides, including LNA and cET or 2′ substituted modifications like of 2′-O-alkyl-RNA, 2′-O-methyl-RNA, 2′-alkoxy-RNA, 2′-O-methoxyethyl-RNA (MOE), 2′-amino-DNA, 2′-fluoro-DNA, arabino nucleic acid (ANA), 2′-fluoro-ANA. In particular, 2′fluoro, 2′-O-methyl or 2′-O-methoxyethyl may be incorporated into siRNAs.

[0038] In some embodiments, some, most, or all (e.g., 75-90%, 80-95%, 90-99%, or 100%) of the nucleotides of an siRNA sense (passenger) strand may be modified with 2′ sugar modified nucleosides such as LNA (see WO2004/083430 and WO2007/085485, for example). In some embodiments, the passenger stand of the siRNA may be discontinuous (see WO2007/107162 for example). In some embodiments, thermally destabilizing nucleotides at a seed region of the antisense strand of siRNAs are useful in reducing off-target activity of the siRNAs (see WO2018/098328 for example). In some embodiments, the siRNA comprises a 5′ phosphate group or a 5′-phosphate mimic at the 5′ end of the antisense strand. In some embodiments, the 5′ end of the antisense strand is a RNA nucleoside.

[0039] In one embodiment, the siRNA molecule further comprises at least one phosphorothioate or methylphosphonate internucleoside linkage. The phosphorothioaie or methylphosphonate internucleoside linkage may be at the 3′-terminus of one or both strands (e.g., the antisense strand and/or the sense strand); or the phosphorothioate or methylphosphonate internucleoside linkage may be at the 5′-terminus of one or both strands (e.g., the antisense strand and/or the sense strand); or the phosphorothioate or methylphosphonate internucleoside linkage may be at both the 5′- and 3′-termini of one or both strands (e.g., the antisense strand and/or the sense strand). In some embodiments, the remaining internucleoside linkages are phosphodiester linkages. In some embodiments, the siRNA molecule comprises one or more phosphorothioate internucleoside linkages. In siRNA molecules, phosphorothioate internucleoside linkages may reduce or inhibit nuclease cleavage in RICS. Accordingly, in some embodiments, not all internucleoside linkages in the antisense strand are modified, e.g., in some embodiments, 10-90%, 20-80%, 30-70%, or 40-60% of internucleoside linkages in the antisense strand are modified.

[0040] The siRNA molecule may further comprise a ligand. In some embodiments, the ligand is conjugated to the 3′ end of the sense strand.

[0041] For biological distribution, siRNAs may be conjugated to a targeting ligand, and/or be formulated into lipid nanoparticles. In a particular example, the nucleic acid molecule is conjugated to a moiety that targets a brain cell or other cell of the CNS. Thus, the nucleic acid molecule may be conjugated to a moiety that facilitates delivery across the blood brain barrier. For example, the nucleic acid molecule may be conjugated to an antibody or antibody fragment targeting the transferrin receptor.

[0042] Other aspects of the invention relate to pharmaceutical compositions, in particular, pharmaceutical compositions comprising dsRNA, such as siRNA molecules suitable for therapeutic use, and methods of inhibiting the expression of a target gene by administering the dsRNA molecules such as siRNAs of the invention, e.g., for the treatment of various disease conditions as disclosed herein.

[0043] shRNA

[0044] The term “short hairpin RNA” or “shRNA” refers to molecules that are generally between 40 and 70 nucleotides in length, such as between 45 and 65 nucleotides in length, such as 50 and 60 nucleotides in length and form a stem loop (hairpin) RNA structure which can interact with the endonuclease known as Dicer (believed to processes dsRNA into 19-23 base pair short interfering RNAs with characteristic two base 3′ overhangs which then can be incorporated into an RNA-induced silencing complex (RISC)). Upon binding to the appropriate target mRNA, one or more endonucleases within the RISC cleave the target to induce silencing. shRNA oligonucleotides may be chemically modified using modified internucleotide linkages and 2′ sugar modified nucleosides, such as 2′-4′ bicyclic ribose modified nucleosides, including LNA and cET or 2′ substituted modifications like of 2′-O-alkyl-RNA, 2′-O-methyl-RNA, 2′-alkoxy-RNA, 2′-O-methoxyethyl-RNA (MOE), 2′-amino-DNA, 2′-fluoro-DNA, arabino nucleic acid (ANA), 2′-fluoro-ANA. In some embodiments, an shRNA molecule comprises one or more phosphorothioate internucleoside linkages. In RNAi molecules, phosphorothioate internucleoside linkages may reduce or inhibit nuclease cleavage in RICS. Accordingly, not all internucleoside linkages in the stem loop of the shRNA molecule are modified, e.g., in some embodiments, 10-90%, 20-80%, 30-70%, or 40-60% of internucleoside linkages in the antisense strand are modified. Phosphorothioate internucleoside linkages can advantageously be placed in the 3′ and/or 5′ end of the stem loop of the shRNA molecule, in particular, in the part of the molecule that is not complementary to the target nucleic acid. The region of the shRNA molecule that is complementary to the target nucleic acid may however also be modified, e.g., in the first 2 to 3 internucleoside linkages in the part that is predicted to become the 3′ and/or 5′ terminal following cleavage by Dicer.

[0045] Contiguous Nucleotide Sequence

[0046] The term “contiguous nucleotide sequence” refers to the region of the nucleic acid molecule, which is complementary to the target nucleic acid. The term is used interchangeably herein with the term “contiguous nucleobase sequence” and the term “oligonucleotide motif sequence”. In some embodiments, all the nucleotides of the oligonucleotide constitute the contiguous nucleotide sequence. In some embodiments, the contiguous nucleotide sequence is included in the guide strand of an siRNA molecule. In some embodiments, the contiguous nucleotide sequence is the part of an shRNA molecule, which is 95%, 98%, 99%, or 100% complementary to the target nucleic acid. In some embodiments, the oligonucleotide comprises the contiguous nucleotide sequence, such as a F-G-F′ gapmer region, and may optionally comprise further nucleotide(s), for example, a nucleotide linker region which may be used to attach a functional group (e.g. a conjugate group for targeting) to the contiguous nucleotide sequence. The nucleotide linker region may or may not be complementary to the target nucleic acid. In some embodiments, the nucleobase sequence of the antisense oligonucleotide is the contiguous nucleotide sequence. In some embodiments, the contiguous nucleotide sequence is 100% complementary to the target nucleic acid.

[0047] Nucleotides and Nucleosides

[0048] Nucleotides and nucleosides are the building blocks of oligonucleotides and polynucleotides, and for the purposes of the present invention include both naturally occurring and non-naturally occurring nucleotides and nucleosides. In nature, nucleotides, such as DNA and RNA nucleotides comprise a ribose sugar moiety, a nucleobase moiety and one or more phosphate groups (which is absent in nucleosides). Nucleosides and nucleotides may also interchangeably be referred to as “units” or “monomers”.

[0049] Modified Nucleoside

[0050] The term “modified nucleoside” or “nucleoside modification” as used herein refers to nucleosides modified as compared to the equivalent DNA or RNA nucleoside by the introduction of one or more modifications of the sugar moiety or the (nucleo)base moiety. Advantageously, in some embodiments, one or more of the modified nucleoside comprises a modified sugar moiety. The term “modified nucleoside” may also be used herein interchangeably with the term “nucleoside analogue” or “modified unit” or “modified monomer”. Nucleosides with an unmodified DNA or RNA sugar moiety are termed DNA or RNA nucleosides herein. Nucleosides with modifications in the base region of the DNA or RNA nucleoside are still generally termed DNA or RNA if they allow Watson Crick base pairing.

[0051] Modified Internucleoside Linkage

[0052] The term “modified internucleoside linkage” is defined as generally understood by the skilled person, such as, as being a linkage other than phosphodiester (PO) linkages, that covalently couples two nucleosides together. The oligonucleotides of the invention may therefore comprise one or more modified internucleoside linkages, such as a one or more phosphorothioate internucleoside linkages, or one or more phosphorodithioate internucleoside linkages.

[0053] With the oligonucleotide of the invention, it can be advantageous to use phosphorothioate internucleoside linkages, e.g., for 10-90%, 20-80%, 30-70%, or 40-60% of internucleoside linkages.

[0054] Phosphorothioate internucleoside linkages are particularly useful due to nuclease resistance, beneficial pharmacokinetics, and ease of manufacture. In some embodiments, at least 50% of the internucleoside linkages in the oligonucleotide, or contiguous nucleotide sequence thereof, are phosphorothioate, such as at least 60%, e.g., 60-80%; such as at least 70%, e.g., 70-85%; such as at least 75%, e.g., 75-90%; such as at least 80%, e.g. 80-95%; or such as at least 90%, e.g., 90-99%, of the internucleoside linkages in the oligonucleotide, or contiguous nucleotide sequence thereof, are phosphorothioate. In some embodiments, all of the internucleoside linkages of the oligonucleotide, or contiguous nucleotide sequence thereof, are phosphorothioate.

[0055] In some advantageous embodiments, all the internucleoside linkages of the contiguous nucleotide sequence of the oligonucleotide are phosphorothioate, or all the internucleoside linkages of the oligonucleotide are phosphorothioate linkages.

[0056] In some embodiments, the antisense oligonucleotides may comprise other internucleoside linkages (other than phosphodiester and phosphorothioate), for example alkyl phosphonate/methyl phosphonate internucleoside linkages, which may be tolerated in an otherwise DNA phosphorothioate gap region (e.g., as in EP 2 742 135).

[0057] Nucleobase

[0058] The term “nucleobase” includes the purine (e.g. adenine and guanine) and pyrimidine (e.g. uracil, thymine and cytosine) moiety present in nucleosides and nucleotides, which form hydrogen bonds in nucleic acid hybridization. In the context of the present invention, the term nucleobase also encompasses modified nucleobases, which may differ from naturally occurring nucleobases, but are functional during nucleic acid hybridization. In this context, “nucleobase” refers to both naturally occurring nucleobases such as adenine, guanine, cytosine, thymidine, uracil, xanthine and hypoxanthine, as well as non-naturally occurring variants. Such variants are for example described in Hirao et al (2012) Accounts of Chemical Research vol 45 page 2055 and Bergstrom (2009) Current Protocols in Nucleic Acid Chemistry Suppl. 37 1.4.1.

[0059] In some embodiments, the nucleobase moiety is modified by changing the purine or pyrimidine into a modified purine or pyrimidine, such as substituted purine or substituted pyrimidine, such as a nucleobase selected from isocytosine, pseudoisocytosine, 5-methyl cytosine, 5-thiozolo-cytosine, 5-propynyl-cytosine, 5-propynyl-uracil, 5-bromouracil 5-thiazolo-uracil, 2-thio-uracil, 2′thio-thymine, inosine, diaminopurine, 6-aminopurine, 2-aminopurine, 2,6-diaminopurine and 2-chloro-6-aminopurine.

[0060] The nucleobase moieties may be indicated by the letter code for each corresponding nucleobase, e.g. A, T, G, C or U, wherein each letter may optionally include modified nucleobases of equivalent function. For example, in the exemplified oligonucleotides, the nucleobase moieties are selected from A, T, G, C, and 5-methyl cytosine. Optionally, for LNA gapmers, 5-methyl cytosine LNA nucleosides may be used.

[0061] Modified Oligonucleotide

[0062] The term “modified oligonucleotide” describes an oligonucleotide comprising one or more sugar-modified nucleosides and/or modified internucleoside linkages and/or modified nucleobases. The term “chimeric oligonucleotide” is a term that has been used in the literature to describe oligonucleotides comprising modified nucleosides and DNA nucleosides. The antisense oligonucleotide of the invention is advantageously a chimeric oligonucleotide.

[0063] Complementarity

[0064] The term “complementarity” or “complementary” describes the capacity for Watson-Crick base-pairing of nucleosides/nucleotides. Watson-Crick base pairs are guanine (G)-cytosine (C) and adenine (A)-thymine (T)/uracil (U). It will be understood that oligonucleotides may comprise nucleosides with modified nucleobases, for example 5-methyl cytosine is often used in place of cytosine, and as such the term complementarity encompasses Watson Crick base-paring between non-modified and modified nucleobases (see for example Hirao et al (2012) Accounts of Chemical Research vol 45 page 2055 and Bergstrom (2009) Current Protocols in Nucleic Acid Chemistry Suppl. 37 1.4.1).

[0065] The term “% complementary” as used herein, refers to the proportion of nucleotides (in percent) of a contiguous nucleotide sequence in a nucleic acid molecule (e.g. oligonucleotide) which across the contiguous nucleotide sequence, are complementary to a reference sequence (e.g. a target sequence or sequence motif). The percentage of complementarity is thus calculated by counting the number of aligned nucleobases that are complementary (from Watson Crick base pair) between the two sequences (when aligned with the target sequence 5′-3′ and the oligonucleotide sequence from 3′-5′), dividing that number by the total number of nucleotides in the oligonucleotide and multiplying by 100. In such a comparison, a nucleobase/nucleotide, which does not align (form a base pair), is termed a mismatch. Insertions and deletions are not allowed in the calculation of complementarity of a contiguous nucleotide sequence. It will be understood that in determining complementarity, chemical modifications of the nucleobases are disregarded as long as the functional capacity of the nucleobase to form Watson Crick base pairing is retained (e.g. 5′-methyl cytosine is considered identical to a cytosine for the purpose of calculating % identity).

[0066] The term “fully complementary”, refers to 100% complementarity.

[0067] Identity

[0068] The term “Identity” as used herein, refers to the proportion of nucleotides (expressed in percent) of a contiguous nucleotide sequence in a nucleic acid molecule (e.g. oligonucleotide) which across the contiguous nucleotide sequence, are identical to a reference sequence (e.g. a sequence motif). The percentage of identity is thus calculated by counting the number of aligned nucleobases that are identical (a Match) between two sequences (in the contiguous nucleotide sequence of the compound of the invention and in the reference sequence), dividing that number by the total number of nucleotides in the oligonucleotide and multiplying by 100. Therefore, Percentage of Identity=(Matches×100)/Length of aligned region (e.g. the contiguous nucleotide sequence). Insertions and deletions are not allowed in the calculation the percentage of identity of a contiguous nucleotide sequence. It will be understood that in determining identity, chemical modifications of the nucleobases are disregarded as long as the functional capacity of the nucleobase to form Watson Crick base pairing is retained (e.g. 5-methyl cytosine is considered identical to a cytosine for the purpose of calculating % identity).

[0069] Hybridization

[0070] The term “hybridizing” or “hybridizes” as used herein is to be understood as referring to two nucleic acid strands (e.g. an oligonucleotide and a target nucleic acid) forming hydrogen bonds between base pairs on opposite strands, thereby forming a duplex. The affinity of the binding between two nucleic acid strands is the strength of the hybridization. It is often described in terms of the melting temperature (Tm) defined as the temperature at which half of the oligonucleotides are duplexed with the target nucleic acid. At physiological conditions, Tm is not strictly proportional to the affinity (Mergny and Lacroix, 2003, Oligonucleotides 13:515-537). The standard state Gibbs free energy ΔG° is a more accurate representation of binding affinity and is related to the dissociation constant (Kd) of the reaction by ΔG°=−RT ln(Kd), where R is the gas constant and T is the absolute temperature. Therefore, a very low ΔG° of the reaction between an oligonucleotide and the target nucleic acid reflects a strong hybridization between the oligonucleotide and target nucleic acid. ΔG° is the energy associated with a reaction where aqueous concentrations are 1M, the pH is 7, and the temperature is 37° C. The hybridization of oligonucleotides to a target nucleic acid is a spontaneous reaction and for spontaneous reactions, ΔG° is less than zero. ΔG° can be measured experimentally, for example, by use of the isothermal titration calorimetry (ITC) method as described in Hansen et al., 1965, Chem. Comm. 36-38 and Holdgate et al., 2005, Drug Discov Today. The skilled person will know that commercial equipment is available for ΔG° measurements. ΔG° can also be estimated numerically by using the nearest neighbor model as described by SantaLucia, 1998, Proc Natl Acad Sci USA. 95: 1460-1465 using appropriately derived thermodynamic parameters described by Sugimoto et al., 1995, Biochemistry 34:11211-11216 and McTigue et al., 2004, Biochemistry 43:5388-5405. In order to have the possibility of modulating a nucleic acid target by hybridization, oligonucleotides of the present invention hybridize to a target nucleic acid with estimated ΔG° values below −10 kcal/mol for oligonucleotides that are 10 to 30 nucleotides in length. In some embodiments, the degree or strength of hybridization is measured by the standard state Gibbs free energy ΔG°. The oligonucleotides may hybridize to a target nucleic acid with estimated ΔG° values below −10 kcal/mol, such as below −15 kcal/mol, such as below −20 kcal/mol and such as below −25 kcal/mol for oligonucleotides that are 8 to 30 nucleotides in length. In some embodiments, the oligonucleotides hybridize to a target nucleic acid with an estimated ΔG° value in the range of −10 to −60 kcal/mol, such as −12 to −40, such as from −15 to −30 kcal/mol or −16 to −27 kcal/mol such as −18 to −25 kcal/mol.

[0071] Target Nucleic Acid

[0072] According to the present invention, the target nucleic acid is a nucleic acid, which encodes a mammalian C4A or a mammalian C4B and may for example be a gene, a RNA, a mRNA, and pre-mRNA, a mature mRNA or a cDNA sequence. The target may therefore be referred to as C4A target nucleic acid or C4B target nucleic acid.

[0073] The therapeutic oligonucleotides of the invention may for example target exon regions of a mammalian C4A and/or C4B (in particular siRNA and shRNA, but also antisense oligonucleotides), or may for example target any intron region in the C4A and/or C4B pre-mRNA (in particular antisense oligonucleotides).

[0074] Table 1a and 1 b list predicted exon and intron regions of SEQ ID NO: 3 and 4, i.e. of the human C4A and C4B pre-mRNA sequence.

TABLE 1a
Exons and introns in the human C4A pre-mRNA.

| Exemplary exonic regions in the | | | Exemplary intronic regions in the | | |
|---|---|---|---|---|---|
| human C4A premRNA (SEQ ID | | | human C4A premRNA (SEQ ID | | |
| NO 3) | | | NO 3) | | |
| ID | start | end | ID | start | end |
| Ea1 | 1 | 149 | Ia1 | 150 | 281 |
| Ea2 | 282 | 480 | Ia2 | 481 | 694 |
| Ea3 | 695 | 896 | Ia3 | 897 | 1105 |
| Ea4 | 1106 | 1176 | Ia4 | 1177 | 1254 |
| Ea5 | 1255 | 1343 | Ia5 | 1344 | 1561 |
| Ea6 | 1562 | 1644 | Ia6 | 1645 | 1814 |
| Ea7 | 1815 | 1911 | Ia7 | 1912 | 2049 |
| Ea8 | 2050 | 2155 | Ia8 | 2156 | 2252 |
| Ea9 | 2253 | 2385 | Ia9 | 2386 | 9168 |
| Ea10 | 9169 | 9284 | Ia10 | 9285 | 9383 |
| Ea11 | 9384 | 9563 | Ia11 | 9564 | 9708 |
| Ea12 | 9709 | 9891 | Ia12 | 9892 | 10023 |
| Ea13 | 10024 | 10209 | Ia13 | 10210 | 10362 |
| Ea14 | 10363 | 10521 | Ia14 | 10522 | 10772 |
| Ea15 | 10773 | 10899 | Ia15 | 10900 | 11066 |
| Ea16 | 11067 | 11141 | Ia16 | 11142 | 11401 |
| Ea17 | 11402 | 11599 | Ia17 | 11600 | 11690 |
| Ea18 | 11691 | 11802 | Ia18 | 11803 | 11892 |
| Ea19 | 11893 | 11963 | Ia19 | 11964 | 12221 |
| Ea20 | 12222 | 12361 | Ia20 | 12362 | 12474 |
| Ea21 | 12475 | 12684 | Ia21 | 12685 | 12928 |
| Ea22 | 12929 | 12980 | Ia22 | 12981 | 13081 |
| Ea23 | 13082 | 13171 | Ia23 | 13172 | 13306 |
| Ea24 | 13307 | 13516 | Ia24 | 13517 | 13695 |
| Ea25 | 13696 | 13771 | Ia25 | 13772 | 13931 |
| Ea26 | 13932 | 14088 | Ia26 | 14089 | 14183 |
| Ea27 | 14184 | 14300 | Ia27 | 14301 | 14405 |
| Ea28 | 14406 | 14577 | Ia28 | 14578 | 14805 |
| Ea29 | 14806 | 15038 | Ia29 | 15039 | 15120 |
| Ea30 | 15121 | 15288 | Ia30 | 15289 | 15681 |
| Ea31 | 15682 | 15741 | Ia31 | 15742 | 16790 |
| Ea32 | 16791 | 16884 | Ia32 | 16885 | 16981 |
| Ea33 | 16982 | 17168 | Ia33 | 17169 | 17282 |
| Ea34 | 17283 | 17373 | Ia34 | 17374 | 17463 |
| Ea35 | 17464 | 17538 | Ia35 | 17539 | 19029 |
| Ea36 | 19030 | 19132 | Ia36 | 19133 | 19297 |
| Ea37 | 19298 | 19387 | Ia37 | 19388 | 19472 |
| Ea38 | 19473 | 19571 | Ia38 | 19572 | 19753 |
| Ea39 | 19754 | 19837 | Ia39 | 19838 | 20099 |
| Ea40 | 20100 | 20232 | Ia40 | 20233 | 20375 |
| Ea41 | 20376 | 20658 | | | |

TABLE 1b
Exons and introns in the human C4B pre-mRNA.

| Exemplary exonic regions in the | | | Exemplary intronic regions in the | | |
|---|---|---|---|---|---|
| human C4B premRNA (SEQ ID | | | human C4B premRNA (SEQ ID | | |
| NO 4) | | | NO 4) | | |
| ID | start | end | ID | start | end |
| Eb1 | 1 | 116 | Ib1 | 117 | 248 |
| Eb2 | 249 | 447 | Ib2 | 448 | 661 |
| Eb3 | 662 | 863 | Ib3 | 864 | 1072 |
| Eb4 | 1073 | 1143 | Ib4 | 1144 | 1221 |
| Eb5 | 1222 | 1310 | Ib5 | 1311 | 1528 |
| Eb6 | 1529 | 1611 | Ib6 | 1612 | 1781 |
| Eb7 | 1782 | 1878 | Ib7 | 1879 | 2016 |
| Eb8 | 2017 | 2122 | Ib8 | 2123 | 2219 |
| Eb9 | 2220 | 2352 | Ib9 | 2353 | 9135 |
| Eb10 | 9136 | 9251 | Ib10 | 9252 | 9350 |
| Eb11 | 9351 | 9530 | Ib11 | 9531 | 9675 |
| Eb12 | 9676 | 9858 | Ib12 | 9859 | 9990 |
| Eb13 | 9991 | 10176 | Ib13 | 10177 | 10329 |
| Eb14 | 10330 | 10488 | Ib14 | 10489 | 10739 |
| Eb15 | 10740 | 10866 | Ib15 | 10867 | 11033 |
| Eb16 | 11034 | 11108 | Ib16 | 11109 | 11368 |
| Eb17 | 11369 | 11566 | Ib17 | 11567 | 11657 |
| Eb18 | 11658 | 11769 | Ib18 | 11770 | 11859 |
| Eb19 | 11860 | 11930 | Ib19 | 11931 | 12188 |
| Eb20 | 12189 | 12328 | Ib20 | 12329 | 12441 |
| Eb21 | 12442 | 12651 | Ib21 | 12652 | 12895 |
| Eb22 | 12896 | 12947 | Ib22 | 12948 | 13048 |
| Eb23 | 13049 | 13138 | Ib23 | 13139 | 13273 |
| Eb24 | 13274 | 13483 | Ib24 | 13484 | 13662 |
| Eb25 | 13663 | 13738 | Ib25 | 13739 | 13898 |
| Eb26 | 13899 | 14055 | Ib26 | 14056 | 14150 |
| Eb27 | 14151 | 14267 | Ib27 | 14268 | 14372 |
| Eb28 | 14373 | 14544 | Ib28 | 14545 | 14771 |
| Eb29 | 14772 | 15004 | Ib29 | 15005 | 15086 |
| Eb30 | 15087 | 15254 | Ib30 | 15255 | 15647 |
| Eb31 | 15648 | 15707 | Ib31 | 15708 | 16756 |
| Eb32 | 16757 | 16850 | Ib32 | 16851 | 16947 |
| Eb33 | 16948 | 17134 | Ib33 | 17135 | 17248 |
| Eb34 | 17249 | 17339 | Ib34 | 17340 | 17429 |
| Eb35 | 17430 | 17504 | Ib35 | 17505 | 18995 |
| Eb36 | 18996 | 19098 | Ib36 | 19099 | 19263 |
| Eb37 | 19264 | 19353 | Ib37 | 19354 | 19438 |
| Eb38 | 19439 | 19537 | Ib38 | 19538 | 19719 |
| Eb39 | 19720 | 19803 | Ib39 | 19804 | 20065 |
| Eb40 | 20066 | 20198 | Ib40 | 20199 | 20341 |
| Eb41 | 20342 | 20624 | | | |

[0075] In some embodiments, the target nucleic acid encodes a C4A protein, in particular a mammalian C4A protein, such as a human C4A protein. In some embodiments, the target nucleic acid encodes a C4B protein, in particular a mammalian C4B protein, such as a human C4B protein. See for example Table 2 and Table 3, which provides an overview on the genomic sequences of human, cyno monkey and mouse C4 (Table 2) and on pre-mRNA sequences for human, monkey and mouse C4 and for the mature mRNAs for human C4 (Table 3).

[0076] In some embodiments, the target nucleic acid is selected from the group consisting of SEQ ID NO: 1, 2, 3, 4, 5, 6, and 7, or naturally occurring variants thereof (e.g. sequences encoding a mammalian C4A and/or C4B).

TABLE 2
Genome and assembly information for C4A and C4B across species.

| | | | Genomic | | | NCBI reference |
|---|---|---|---|---|---|---|
| | | | coordinates | | | sequence* accession |
| Species | Chr | Strand | Start | End | Assembly | number for mRNA |
| Mouse | 17 | Rev | 34728380 | 34743882 | GRCm38.p6 | NM_009780.2 |
| Mouse | 17 | Rev | 34809092 | 34823464 | GRCm38.p6 | NM_011413.2 |
| Human | 6 | Fwd | 31982057 | 32002681 | GRCh38.p12 | NM_007293.3 and |
| | | | | | | NM_001252204.1 |
| Human | 6 | Fwd | 32014795 | 32035418 | GRCh38.p12 | NM_001002029.3 |
| Cyno | 4 | Rev | 138859330 | 138873551 | Macaca_fascicularis_5 | |

Fwd = forward strand.
Rev = reverse strand.
The genome coordinates provide the pre-mRNA sequence(genomic sequence).

[0077] If employing the nucleic acid molecule of the invention in research or diagnostics, the target nucleic acid may be a cDNA or a synthetic nucleic acid derived from DNA or RNA.

[0078] For in vivo or in vitro application, the therapeutic nucleic acid molecule of the invention is typically capable of inhibiting the expression of the C4A and/or C4B target nucleic acid in a cell, which is expressing the C4A and C4B target nucleic acid. The contiguous sequence of nucleobases of the nucleic acid molecule of the invention is typically complementary to a conserved region of the C4A and/or C4B target nucleic acid, as measured across the length of the nucleic acid molecule, optionally with the exception of one or two mismatches. In some embodiments, the target nucleic acid is a messenger RNA, such as a pre-mRNA which encodes mammalian C4A protein, such as mouse C4a, e.g. the mouse C4a pre-mRNA sequence, such as that disclosed as SEQ ID NO: 2, the human C4A pre-mRNA sequence, such as that disclosed as SEQ ID NO: 3, or the cyno monkey C4 pre-mRNA sequence, such as that disclosed as SEQ ID NO: 5, or a mature C4A mRNA, such as that of a human mature mRNA disclosed as SEQ ID NO: 6. In some embodiments, the target nucleic acid is a messenger RNA, such as a pre-mRNA which encodes mammalian C4B protein, such as mouse C4b, e.g. the mouse C4b pre-mRNA sequence, such as that disclosed as SEQ ID NO: 1, the human C4B pre-mRNA sequence, such as that disclosed as SEQ ID NO: 4, or the cyno monkey C4 pre-mRNA sequence, such as that disclosed as SEQ ID NO: 5, or a mature C4B mRNA, such as that of a human mature mRNA disclosed as SEQ ID NO:7. SEQ ID NOs: 1, 2, 3, 4, 5, 6, and 7, are DNA sequences—it will be understood that target RNA sequences have uracil (U) bases in place of the thymidine bases (T).

[0079] It is known that different, i.e. shorter, annotated mRNA isoforms of the above sequences exist. The isoforms are well-known in the art and can be derived from the known sequence databases.

[0080] Further information on exemplary target nucleic acids is provided in Table 3.

TABLE 3
Overview on target nucleic acids.

| Target Nucleic Acid, Species, Reference | Sequence ID |
|---|---|
| C4b Mus musculus pre-mRNA | SEQ ID NO: 1 |
| C4a Mus musculus pre-mRNA | SEQ ID NO: 2 |
| C4A Homo sapiens pre-mRNA | SEQ ID NO: 3 |
| C4B Homo sapiens pre-mRNA | SEQ ID NO: 4 |
| C4 Macaca fascicularis pre-mRNA | SEQ ID NO: 5 |
| C4A Homo sapiens mature mRNA | SEQ ID NO: 6 |
| C4B Homo sapiens mature mRNA | SEQ ID NO: 7 |

[0081] In some embodiments, the target nucleic acid is SEQ ID NO: 1.

[0082] In some embodiments, the target nucleic acid is SEQ ID NO: 2.

[0083] In some embodiments, the target nucleic acid is SEQ ID NO: 3.

[0084] In some embodiments, the target nucleic acid is SEQ ID NO: 4.

[0085] In some embodiments, the target nucleic acid is SEQ ID NO: 5.

[0086] In some embodiments, the target nucleic acid is SEQ ID NO: 6.

[0087] In some embodiments, the target nucleic acid is SEQ ID NO: 7.

[0088] Target

[0089] The term “target” as used herein refers to the complement component 4 (C4), which can in the context of this disclosure be C4A and/or C4B. Further, the term “target” can refer to the C4A target nucleic acid and/or C4B target nucleic acid, as well as the C4A protein and/or C4B protein. For example, part of the antisense oligonucleotides described herein target both C4A target nucleic acid and C4B target nucleic acid, i.e. such antisense oligonucleotides target both C4A target nucleic acid and C4B target nucleic acid by binding C4A/C4B homologous regions (pan-C4 antisense oligonucleotides). As known in the art, the terms “C4A” and “C4B” (uppercase A/B) relate to the human target. The terms “C4a” and “C4b” (lower case a/b) relate to the mouse target.

[0090] Target Sequence

[0091] The term “target sequence” as used herein refers to a sequence of nucleotides present in the target nucleic acid, which comprises the nucleobase sequence, which is complementary to the oligonucleotide or nucleic acid molecule of the invention. In some embodiments, the target sequence comprises or consists of a region on the target nucleic acid with a nucleobase sequence that is complementary to the contiguous nucleotide sequence of the oligonucleotide of the invention. This region of the target nucleic acid may interchangeably be referred to as the target nucleotide sequence, target sequence or target region. In some embodiments, the target sequence is longer than the complementary sequence of a nucleic acid molecule of the invention, and may, for example represent a preferred region of the target nucleic acid, which may be targeted by several nucleic acid molecules of the invention. It is well known in the art that C4A and C4B genes display high level of variability between individuals. The term “target sequence” encompasses all publicly annotated variants of C4A and C4B.

[0092] In some embodiments, the target sequence is a sequence selected from the group consisting of a human C4A mRNA exon, such as a human C4A mRNA exon selected from the group consisting of Ea1-Ea41 (see for example Table 1a above). In some embodiments, the target sequence is a sequence selected from the group consisting of a human C4B mRNA exon, such as a human C4B mRNA exon selected from the group consisting of Eb1-Eb41 (see for example Table 1 b above).

[0093] Accordingly, the invention provides for an oligonucleotide, wherein said oligonucleotide comprises a contiguous sequence which is at least 90% complementary, such as 90-95% or fully complementary, to an exon region of SEQ ID NO: 3 and 4, selected from the group consisting of Ea1-Ea41 and Eb1-Eb41 (see Table 1a and 1 b).

[0094] In some embodiments, the target sequence is a sequence selected from the group consisting of a human C4A mRNA intron, such as a human C4A mRNA intron selected from the group consisting of Ia1-Ia40 (see for example Table 1a above). In some embodiments, the target sequence is a sequence selected from the group consisting of a human C4B mRNA exon, such as a human C4B mRNA intron selected from the group consisting of Ib1-Ib40 (see for example Table 1 b above).

[0095] Accordingly, the invention provides an oligonucleotide, wherein said oligonucleotide comprises a contiguous sequence which is at least 90% complementary, such as 90-95% or fully complementary, to an intron region of SEQ ID NO: 3 and 4, selected from the group consisting of Ia1-Ia40 and Ib1-Ib40 (see Table(s) la and 1b).

[0096] In some embodiments, the target sequence is selected from the group consisting of SEQ ID NO: 6, and 7. In some embodiments, the contiguous nucleotide sequence as referred to herein is at least 90% (e.g., 90-95%) complementary, such as at least 95% (e.g., 95-98) complementary to a target sequence selected from the group consisting of SEQ ID NO: 6, and 7. In some embodiments, the contiguous nucleotide sequence is fully complementary to a target sequence selected from the group consisting of SEQ ID NO: 6, and 7.

[0097] The oligonucleotide of the invention comprises a contiguous nucleotide sequence, which is complementary to or hybridizes to a region on the target nucleic acid, such as a target sequence described herein.

[0098] The target nucleic acid sequence to which the oligonucleotide is complementary or hybridizes to generally comprises a stretch of contiguous nucleobases of at least 10 nucleotides. The contiguous nucleotide sequence is between 12 to 70 nucleotides, such as 12 to 50, such as 13 to 30, such as 14 to 25, such as 15 to 21 contiguous nucleotides.

[0099] In some embodiments, the oligonucleotide of the present invention targets a region shown in Table 4a and 4b.

TABLE 4a
Exemplary target regions on SEQ ID NO: 3

| | start | end |
|---|---|---|
| Target | SEQ ID | SEQ ID |
| region | NO: 3 | NO: 3 |
| 1A | 22 | 65 |
| 2A | 74 | 92 |
| 3A | 94 | 131 |
| 4A | 133 | 196 |
| 5A | 200 | 230 |
| 6A | 248 | 390 |
| 7A | 405 | 452 |
| 8A | 454 | 485 |
| 9A | 496 | 516 |
| 10A | 567 | 591 |
| 11A | 612 | 640 |
| 12A | 648 | 670 |
| 13A | 678 | 702 |
| 14A | 712 | 768 |
| 15A | 770 | 800 |
| 16A | 819 | 852 |
| 17A | 854 | 922 |
| 18A | 945 | 980 |
| 19A | 982 | 997 |
| 20A | 1031 | 1046 |
| 21A | 1056 | 1072 |
| 22A | 1074 | 1091 |
| 23A | 1099 | 1133 |
| 24A | 1135 | 1168 |
| 25A | 1170 | 1236 |
| 26A | 1238 | 1286 |
| 27A | 1295 | 1349 |
| 28A | 1351 | 1368 |
| 29A | 1370 | 1384 |
| 30A | 1386 | 1431 |
| 31A | 1444 | 1485 |
| 32A | 1487 | 1501 |
| 33A | 1504 | 1524 |
| 34A | 1541 | 1612 |
| 35A | 1614 | 1673 |
| 36A | 1675 | 1701 |
| 37A | 1719 | 1737 |
| 38A | 1739 | 1756 |
| 39A | 1780 | 1890 |
| 40A | 1892 | 1938 |
| 41A | 1950 | 1966 |
| 42A | 1968 | 1989 |
| 43A | 1998 | 2040 |
| 44A | 2042 | 2100 |
| 45A | 2102 | 2128 |
| 46A | 2130 | 2173 |
| 47A | 2175 | 2204 |
| 48A | 2226 | 2302 |
| 49A | 2312 | 2329 |
| 50A | 2342 | 2418 |
| 51A | 2422 | 2452 |
| 52A | 2487 | 2522 |
| 53A | 2538 | 2562 |
| 54A | 2606 | 2638 |
| 55A | 2649 | 2668 |
| 56A | 3229 | 3243 |
| 57A | 3231 | 3245 |
| 58A | 9028 | 9045 |
| 59A | 9047 | 9070 |
| 60A | 9072 | 9099 |
| 61A | 9108 | 9130 |
| 62A | 9142 | 9161 |
| 63A | 9163 | 9204 |
| 64A | 9206 | 9317 |
| 65A | 9320 | 9348 |
| 66A | 9350 | 9445 |
| 67A | 9447 | 9477 |
| 68A | 9501 | 9526 |
| 69A | 9528 | 9562 |
| 70A | 9564 | 9618 |
| 71A | 9595 | 9611 |
| 72A | 9665 | 9687 |
| 73A | 9701 | 9725 |
| 74A | 9736 | 9911 |
| 75A | 9921 | 9945 |
| 76A | 9956 | 9971 |
| 77A | 9973 | 10010 |
| 78A | 10019 | 10074 |
| 79A | 10090 | 10153 |
| 80A | 10155 | 10214 |
| 81A | 10226 | 10241 |
| 82A | 10250 | 10295 |
| 83A | 10309 | 10327 |
| 84A | 10352 | 10389 |
| 85A | 10393 | 10430 |
| 86A | 10440 | 10540 |
| 87A | 10562 | 10577 |
| 88A | 10589 | 10613 |
| 89A | 10635 | 10662 |
| 90A | 10665 | 10685 |
| 91A | 10693 | 10712 |
| 92A | 10741 | 10763 |
| 93A | 10764 | 10782 |
| 94A | 10784 | 10798 |
| 95A | 10800 | 10876 |
| 96A | 10890 | 10931 |
| 97A | 10933 | 10963 |
| 98A | 10987 | 11008 |
| 99A | 11001 | 11017 |
| 100A | 11012 | 11054 |
| 101A | 11056 | 11070 |
| 102A | 11073 | 11099 |
| 103A | 11114 | 11149 |
| 104A | 11166 | 11181 |
| 105A | 11200 | 11219 |
| 106A | 11238 | 11277 |
| 107A | 11284 | 11303 |
| 108A | 11305 | 11337 |
| 109A | 11339 | 11375 |
| 110A | 11377 | 11420 |
| 111A | 11422 | 11467 |
| 112A | 11469 | 11495 |
| 113A | 11497 | 11566 |
| 114A | 11586 | 11634 |
| 115A | 11637 | 11655 |
| 116A | 11657 | 11671 |
| 117A | 11673 | 11812 |
| 118A | 11870 | 11925 |
| 119A | 11939 | 11967 |
| 120A | 11972 | 11996 |
| 121A | 12017 | 12054 |
| 122A | 12086 | 12116 |
| 123A | 12118 | 12142 |
| 124A | 12155 | 12195 |
| 125A | 12213 | 12235 |
| 126A | 12251 | 12347 |
| 127A | 12352 | 12367 |
| 128A | 12375 | 12392 |
| 129A | 12394 | 12409 |
| 130A | 12411 | 12428 |
| 131A | 12454 | 12572 |
| 132A | 12574 | 12593 |
| 133A | 12595 | 12611 |
| 134A | 12613 | 12641 |
| 135A | 12643 | 12659 |
| 136A | 12667 | 12706 |
| 137A | 12719 | 12748 |
| 138A | 12750 | 12784 |
| 139A | 12807 | 12855 |
| 140A | 12875 | 12902 |
| 141A | 12904 | 12947 |
| 142A | 12949 | 12976 |
| 143A | 12989 | 13006 |
| 144A | 13008 | 13106 |
| 145A | 13108 | 13160 |
| 146A | 13162 | 13188 |
| 147A | 13190 | 13210 |
| 148A | 13227 | 13267 |
| 149A | 13284 | 13328 |
| 150A | 13330 | 13349 |
| 151A | 13351 | 13375 |
| 152A | 13386 | 13467 |
| 153A | 13477 | 13496 |
| 154A | 13498 | 13526 |
| 155A | 13530 | 13546 |
| 156A | 13548 | 13566 |
| 157A | 13568 | 13594 |
| 158A | 13621 | 13642 |
| 159A | 13644 | 13692 |
| 160A | 13694 | 13758 |
| 161A | 13799 | 13813 |
| 162A | 13857 | 13874 |
| 163A | 13892 | 13918 |
| 164A | 13924 | 13947 |
| 165A | 13949 | 14009 |
| 166A | 14017 | 14042 |
| 167A | 14056 | 14070 |
| 168A | 14082 | 14105 |
| 169A | 14145 | 14168 |
| 170A | 14201 | 14269 |
| 171A | 14285 | 14305 |
| 172A | 14308 | 14326 |
| 173A | 14394 | 14449 |
| 174A | 14457 | 14515 |
| 175A | 14532 | 14584 |
| 176A | 14608 | 14642 |
| 177A | 14644 | 14676 |
| 178A | 14749 | 14771 |
| 179A | 14803 | 14831 |
| 180A | 14833 | 14860 |
| 181A | 14881 | 14965 |
| 182A | 14967 | 14981 |
| 183A | 14988 | 15048 |
| 184A | 15064 | 15079 |
| 185A | 15109 | 15176 |
| 186A | 15190 | 15218 |
| 187A | 15244 | 15301 |
| 188A | 15323 | 15355 |
| 189A | 15381 | 15414 |
| 190A | 15418 | 15437 |
| 191A | 15439 | 15478 |
| 192A | 15514 | 15540 |
| 193A | 15554 | 15608 |
| 194A | 15610 | 15630 |
| 195A | 15643 | 15668 |
| 196A | 15679 | 15742 |
| 197A | 15794 | 15817 |
| 198A | 15819 | 15855 |
| 199A | 15857 | 15897 |
| 200A | 15915 | 15942 |
| 201A | 15966 | 15995 |
| 202A | 16003 | 16024 |
| 203A | 16026 | 16043 |
| 204A | 16045 | 16064 |
| 205A | 16068 | 16086 |
| 206A | 16126 | 16178 |
| 207A | 16180 | 16212 |
| 208A | 16244 | 16268 |
| 209A | 16280 | 16327 |
| 210A | 16329 | 16363 |
| 211A | 16385 | 16405 |
| 212A | 16456 | 16486 |
| 213A | 16497 | 16584 |
| 214A | 16589 | 16603 |
| 215A | 16674 | 16699 |
| 216A | 16724 | 16752 |
| 217A | 16762 | 16800 |
| 218A | 16802 | 16843 |
| 219A | 16845 | 16908 |
| 220A | 16941 | 17022 |
| 221A | 17049 | 17185 |
| 222A | 17187 | 17265 |
| 223A | 17274 | 17325 |
| 224A | 17327 | 17366 |
| 225A | 17368 | 17383 |
| 226A | 17387 | 17405 |
| 227A | 17415 | 17445 |
| 228A | 17448 | 17552 |
| 229A | 17558 | 17579 |
| 230A | 17595 | 17631 |
| 231A | 17690 | 17724 |
| 232A | 17789 | 17837 |
| 233A | 17841 | 17861 |
| 234A | 17874 | 17896 |
| 235A | 17901 | 17918 |
| 236A | 17930 | 17953 |
| 237A | 17960 | 17977 |
| 238A | 17970 | 17984 |
| 239A | 17987 | 18008 |
| 240A | 18038 | 18053 |
| 241A | 18055 | 18074 |
| 242A | 18076 | 18095 |
| 243A | 18121 | 18170 |
| 244A | 18172 | 18190 |
| 245A | 18207 | 18269 |
| 246A | 18358 | 18376 |
| 247A | 18389 | 18423 |
| 248A | 18418 | 18455 |
| 249A | 18462 | 18495 |
| 250A | 18515 | 18552 |
| 251A | 18582 | 18596 |
| 252A | 18606 | 18621 |
| 253A | 18638 | 18652 |
| 254A | 18654 | 18668 |
| 255A | 18680 | 18713 |
| 256A | 18715 | 18729 |
| 257A | 18731 | 18761 |
| 258A | 18776 | 18807 |
| 259A | 18824 | 18875 |
| 260A | 18877 | 18895 |
| 261A | 18901 | 18933 |
| 262A | 18972 | 19022 |
| 263A | 19024 | 19076 |
| 264A | 19081 | 19107 |
| 265A | 19109 | 19130 |
| 266A | 19171 | 19188 |
| 267A | 19230 | 19259 |
| 268A | 19288 | 19344 |
| 269A | 19346 | 19423 |
| 270A | 19438 | 19458 |
| 271A | 19466 | 19616 |
| 272A | 19630 | 19648 |
| 273A | 19650 | 19667 |
| 274A | 19677 | 19698 |
| 275A | 19713 | 19728 |
| 276A | 19742 | 19763 |
| 277A | 19765 | 19790 |
| 278A | 19792 | 19846 |
| 279A | 19853 | 19870 |
| 280A | 19872 | 19893 |
| 281A | 19900 | 19934 |
| 282A | 19966 | 19990 |
| 283A | 19992 | 20019 |
| 284A | 20048 | 20065 |
| 285A | 20067 | 20081 |
| 286A | 20083 | 20116 |
| 287A | 20132 | 20151 |
| 288A | 20156 | 20180 |
| 289A | 20182 | 20239 |
| 290A | 20246 | 20260 |
| 291A | 20264 | 20294 |
| 292A | 20296 | 20320 |
| 293A | 20330 | 20420 |
| 294A | 20422 | 20462 |
| 295A | 20474 | 20530 |
| 296A | 20554 | 20585 |
| 297A | 20597 | 20629 |

TABLE 4b
Exemplary target regions on SEQ ID NO: 4

| | start | end |
|---|---|---|
| Target | SEQ ID | SEQ ID |
| region | NO: 4 | NO: 4 |
| 1B | 1 | 32 |
| 2B | 41 | 59 |
| 3B | 61 | 98 |
| 4B | 100 | 163 |
| 5B | 167 | 197 |
| 6B | 215 | 357 |
| 7B | 372 | 419 |
| 8B | 421 | 452 |
| 9B | 463 | 483 |
| 10B | 534 | 558 |
| 11B | 579 | 607 |
| 12B | 615 | 637 |
| 13B | 645 | 669 |
| 14B | 679 | 735 |
| 15B | 737 | 767 |
| 16B | 786 | 819 |
| 17B | 821 | 889 |
| 18B | 912 | 947 |
| 19B | 949 | 964 |
| 20B | 998 | 1013 |
| 21B | 1023 | 1039 |
| 22B | 1041 | 1058 |
| 23B | 1066 | 1100 |
| 24B | 1102 | 1135 |
| 25B | 1137 | 1203 |
| 26B | 1205 | 1253 |
| 27B | 1262 | 1316 |
| 28B | 1318 | 1335 |
| 29B | 1337 | 1351 |
| 30B | 1353 | 1398 |
| 31B | 1411 | 1452 |
| 32B | 1454 | 1468 |
| 33B | 1471 | 1491 |
| 34B | 1508 | 1579 |
| 35B | 1581 | 1640 |
| 36B | 1642 | 1668 |
| 37B | 1686 | 1704 |
| 38B | 1706 | 1723 |
| 39B | 1747 | 1857 |
| 40B | 1859 | 1905 |
| 41B | 1917 | 1933 |
| 42B | 1935 | 1956 |
| 43B | 1965 | 2007 |
| 44B | 2009 | 2067 |
| 45B | 2069 | 2095 |
| 46B | 2097 | 2140 |
| 47B | 2142 | 2171 |
| 48B | 2193 | 2269 |
| 49B | 2279 | 2296 |
| 50B | 2309 | 2385 |
| 51B | 2389 | 2419 |
| 52B | 2454 | 2489 |
| 53B | 2505 | 2529 |
| 54B | 2573 | 2605 |
| 55B | 2616 | 2635 |
| 56B | 3196 | 3210 |
| 57B | 3198 | 3212 |
| 58B | 8995 | 9012 |
| 59B | 9014 | 9037 |
| 60B | 9039 | 9066 |
| 61B | 9075 | 9097 |
| 62B | 9109 | 9128 |
| 63B | 9130 | 9171 |
| 64B | 9173 | 9284 |
| 65B | 9287 | 9315 |
| 66B | 9317 | 9412 |
| 67B | 9414 | 9444 |
| 68B | 9468 | 9493 |
| 69B | 9495 | 9529 |
| 70B | 9531 | 9585 |
| 71B | 9562 | 9578 |
| 72B | 9632 | 9654 |
| 73B | 9668 | 9692 |
| 74B | 9703 | 9878 |
| 75B | 9888 | 9912 |
| 76B | 9923 | 9938 |
| 77B | 9940 | 9977 |
| 78B | 9986 | 10041 |
| 79B | 10057 | 10120 |
| 80B | 10122 | 10181 |
| 81B | 10193 | 10208 |
| 82B | 10217 | 10262 |
| 83B | 10276 | 10294 |
| 84B | 10319 | 10356 |
| 85B | 10360 | 10397 |
| 86B | 10407 | 10507 |
| 87B | 10529 | 10544 |
| 88B | 10556 | 10580 |
| 89B | 10602 | 10629 |
| 90B | 10632 | 10652 |
| 91B | 10660 | 10679 |
| 92B | 10708 | 10730 |
| 93B | 10731 | 10749 |
| 94B | 10751 | 10765 |
| 95B | 10767 | 10843 |
| 96B | 10857 | 10898 |
| 97B | 10900 | 10930 |
| 98B | 10954 | 10975 |
| 99B | 10968 | 10984 |
| 100B | 10979 | 11021 |
| 101B | 11023 | 11037 |
| 102B | 11040 | 11066 |
| 103B | 11081 | 11116 |
| 104B | 11133 | 11148 |
| 105B | 11167 | 11186 |
| 106B | 11205 | 11244 |
| 107B | 11251 | 11270 |
| 108B | 11272 | 11304 |
| 109B | 11306 | 11342 |
| 110B | 11344 | 11387 |
| 111B | 11389 | 11434 |
| 112B | 11436 | 11462 |
| 113B | 11464 | 11533 |
| 114B | 11553 | 11601 |
| 115B | 11604 | 11622 |
| 116B | 11624 | 11638 |
| 117B | 11640 | 11779 |
| 118B | 11837 | 11892 |
| 119B | 11906 | 11934 |
| 120B | 11939 | 11963 |
| 121B | 11984 | 12021 |
| 122B | 12053 | 12083 |
| 123B | 12085 | 12109 |
| 124B | 12122 | 12162 |
| 125B | 12180 | 12202 |
| 126B | 12218 | 12314 |
| 127B | 12319 | 12334 |
| 128B | 12341 | 12359 |
| 129B | 12361 | 12376 |
| 130B | 12378 | 12395 |
| 131B | 12421 | 12539 |
| 132B | 12541 | 12560 |
| 133B | 12580 | 12608 |
| 134B | 12610 | 12626 |
| 135B | 12634 | 12673 |
| 136B | 12686 | 12715 |
| 137B | 12717 | 12751 |
| 138B | 12774 | 12822 |
| 139B | 12842 | 12869 |
| 140B | 12871 | 12914 |
| 141B | 12916 | 12943 |
| 142B | 12956 | 12973 |
| 143B | 12975 | 13073 |
| 144B | 13075 | 13127 |
| 145B | 13129 | 13155 |
| 146B | 13157 | 13177 |
| 147B | 13194 | 13234 |
| 148B | 13251 | 13295 |
| 149B | 13297 | 13316 |
| 150B | 13318 | 13342 |
| 151B | 13353 | 13434 |
| 152B | 13444 | 13463 |
| 153B | 13465 | 13493 |
| 154B | 13497 | 13513 |
| 155B | 13515 | 13533 |
| 156B | 13535 | 13561 |
| 157B | 13588 | 13609 |
| 158B | 13611 | 13659 |
| 159B | 13661 | 13735 |
| 160B | 13766 | 13780 |
| 161B | 13824 | 13841 |
| 162B | 13859 | 13885 |
| 163B | 13891 | 13914 |
| 164B | 13916 | 13976 |
| 165B | 13984 | 14009 |
| 166B | 14049 | 14072 |
| 167B | 14112 | 14135 |
| 168B | 14168 | 14236 |
| 169B | 14252 | 14272 |
| 170B | 14275 | 14293 |
| 171B | 14361 | 14394 |
| 172B | 14396 | 14416 |
| 173B | 14424 | 14482 |
| 174B | 14489 | 14551 |
| 175B | 14574 | 14608 |
| 176B | 14610 | 14642 |
| 177B | 14715 | 14737 |
| 178B | 14769 | 14797 |
| 179B | 14799 | 14826 |
| 180B | 14847 | 14931 |
| 181B | 14933 | 14947 |
| 182B | 14954 | 15014 |
| 183B | 15030 | 15045 |
| 184B | 15075 | 15142 |
| 185B | 15156 | 15184 |
| 186B | 15210 | 15267 |
| 187B | 15289 | 15321 |
| 188B | 15347 | 15380 |
| 189B | 15384 | 15403 |
| 190B | 15409 | 15444 |
| 191B | 15480 | 15506 |
| 192B | 15520 | 15548 |
| 193B | 15550 | 15574 |
| 194B | 15576 | 15596 |
| 195B | 15609 | 15634 |
| 196B | 15645 | 15708 |
| 197B | 15760 | 15783 |
| 198B | 15785 | 15821 |
| 199B | 15823 | 15863 |
| 200B | 15881 | 15908 |
| 201B | 15932 | 15961 |
| 202B | 15969 | 15990 |
| 203B | 15992 | 16009 |
| 204B | 16011 | 16030 |
| 205B | 16034 | 16052 |
| 206B | 16092 | 16144 |
| 207B | 16146 | 16178 |
| 208B | 16210 | 16234 |
| 209B | 16246 | 16293 |
| 210B | 16295 | 16329 |
| 211B | 16351 | 16371 |
| 212B | 16422 | 16452 |
| 213B | 16463 | 16550 |
| 214B | 16555 | 16569 |
| 215B | 16640 | 16665 |
| 216B | 16690 | 16718 |
| 217B | 16728 | 16766 |
| 218B | 16768 | 16809 |
| 219B | 16811 | 16874 |
| 220B | 16907 | 16988 |
| 221B | 17015 | 17151 |
| 222B | 17153 | 17231 |
| 223B | 17240 | 17291 |
| 224B | 17293 | 17332 |
| 225B | 17334 | 17349 |
| 226B | 17353 | 17371 |
| 227B | 17381 | 17411 |
| 228B | 17414 | 17518 |
| 229B | 17524 | 17545 |
| 230B | 17561 | 17597 |
| 231B | 17656 | 17690 |
| 232B | 17755 | 17803 |
| 233B | 17807 | 17827 |
| 234B | 17840 | 17862 |
| 235B | 17867 | 17884 |
| 236B | 17896 | 17919 |
| 237B | 17926 | 17943 |
| 238B | 17936 | 17950 |
| 239B | 17953 | 17974 |
| 240B | 18004 | 18019 |
| 241B | 18021 | 18040 |
| 242B | 18042 | 18061 |
| 243B | 18087 | 18136 |
| 244B | 18138 | 18156 |
| 245B | 18173 | 18235 |
| 246B | 18324 | 18342 |
| 247B | 18355 | 18389 |
| 248B | 18384 | 18421 |
| 249B | 18428 | 18461 |
| 250B | 18481 | 18518 |
| 251B | 18548 | 18562 |
| 252B | 18572 | 18587 |
| 253B | 18604 | 18618 |
| 254B | 18620 | 18634 |
| 255B | 18646 | 18679 |
| 256B | 18681 | 18695 |
| 257B | 18697 | 18727 |
| 258B | 18742 | 18773 |
| 259B | 18790 | 18841 |
| 260B | 18843 | 18861 |
| 261B | 18867 | 18899 |
| 262B | 18938 | 18988 |
| 263B | 18990 | 19042 |
| 264B | 19047 | 19073 |
| 265B | 19075 | 19096 |
| 266B | 19137 | 19154 |
| 267B | 19196 | 19225 |
| 268B | 19254 | 19310 |
| 269B | 19312 | 19389 |
| 270B | 19404 | 19424 |
| 271B | 19432 | 19582 |
| 272B | 19596 | 19614 |
| 273B | 19616 | 19633 |
| 274B | 19643 | 19664 |
| 275B | 19679 | 19694 |
| 276B | 19708 | 19729 |
| 277B | 19731 | 19756 |
| 278B | 19758 | 19812 |
| 279B | 19819 | 19836 |
| 280B | 19838 | 19859 |
| 281B | 19866 | 19900 |
| 282B | 19932 | 19956 |
| 283B | 19958 | 19985 |
| 284B | 20014 | 20031 |
| 285B | 20033 | 20047 |
| 286B | 20049 | 20082 |
| 287B | 20098 | 20117 |
| 288B | 20122 | 20146 |
| 289B | 20148 | 20205 |
| 290B | 20212 | 20226 |
| 291B | 20230 | 20260 |
| 292B | 20262 | 20286 |
| 293B | 20296 | 20386 |
| 294B | 20388 | 20428 |
| 295B | 20440 | 20496 |
| 296B | 20520 | 20551 |
| 297B | 20563 | 20595 |

[0100] Target Cell

[0101] The term “target cell” as used herein refers to a cell expressing the target nucleic acid. For the therapeutic use of the present invention, it is advantageous if the target cell is a brain cell. In some embodiments, the brain cell is selected from the group consisting of a neuron, an astrocyte, an oligodendrocyte, and a microglia cell. In some embodiments, the target cell may be in vivo or in vitro. In some embodiments, the target cell is a mammalian cell such as a rodent cell, such as a mouse cell or a rat cell, or a woodchuck cell, or a primate cell such as a monkey cell (e.g. a cynomolgus monkey cell) or a human cell.

[0102] In some embodiments, the target cell expresses C4A mRNA, such as the C4A pre-mRNA or C4A mature mRNA. In some embodiments, the target cell expresses C4B mRNA, such as the C4B pre-mRNA or C4B mature mRNA. The poly A tail of the C4A mRNA or the C4B mRNA is typically disregarded for antisense oligonucleotide targeting.

[0103] Naturally Occurring Variant

[0104] The term “naturally occurring variant” refers to variants of the C4A and/or C4B gene or transcripts which originate from the same genetic loci as the target nucleic acid, but may differ, for example, by virtue of degeneracy of the genetic code causing a multiplicity of codons encoding the same amino acid, or due to alternative splicing of pre-mRNA, or the presence of polymorphisms, such as single nucleotide polymorphisms (SNPs), and allelic variants. Based on the presence of the sufficiently complementary sequence of the oligonucleotide, the oligonucleotide of the invention may therefore target the target nucleic acid and naturally occurring variants thereof.

[0105] In some embodiments, the naturally occurring variants have at least 95% (e.g., 95-98%), such as at least 98% (e.g., 99-99%), or at least 99% (e.g., 99-100%) homology to a mammalian C4A target nucleic acid, such as a target nucleic acid of SEQ ID NO: 3 and/or SEQ ID NO: 5. In some embodiments, the naturally occurring variants have at least 99% (e.g., 99-100%) homology to the human C4A target nucleic acid of SEQ ID NO: 3. In some embodiments, the naturally occurring variants have at least 95% (e.g., 95-98%), such as at least 98% (e.g., 98-99%), or at least 99% (e.g., 99-100%) homology to a mammalian C4B target nucleic acid, such as a target nucleic acid of SEQ ID NO: 4 and/or SEQ ID NO: 5. In some embodiments, the naturally occurring variants have at least 99% (e.g., 99-100%) homology to the human C4B target nucleic acid of SEQ ID NO: 4. In some embodiments, the naturally occurring variants are known polymorphisms.

[0106] Inhibition of Expression

[0107] The term “inhibition of expression” as used herein is to be understood as an overall term for a C4 inhibitor's ability to inhibit an amount or the activity of C4 in a target cell. Inhibition of expression or activity may be determined by measuring the level of C4 pre-mRNA or C4 mRNA, or by measuring the level of C4 protein or activity in a cell. Inhibition of expression may be determined in vitro or in vivo. Inhibition is determined by reference to a control. It is generally understood that the control is an individual or target cell treated with a saline composition. In some embodiments, C4 is C4A and/or C4B.

[0108] The term “inhibitor,” “inhibition” or “inhibit” may also be referred to as down-regulate, reduce, suppress, lessen, lower, or decrease the amount, expression, and/or activity of C4.

[0109] The inhibition of expression of C4A and/or C4B may occur e.g. by degradation of pre-mRNA or mRNA e.g. using RNase H recruiting oligonucleotides, such as gapmers, or nucleic acid molecules that function via the RNA interference pathway, such as siRNA or shRNA. Alternatively, the inhibitor of the present invention may bind to C4A and/or C4B mRNA or polypeptide and inhibit the activity of C4A and/or C4B or prevent its binding to other molecules.

[0110] In some embodiments, the inhibition of expression of the C4A and/or C4B target nucleic acid results in a decreased amount of C4A and/or C4B protein in the target cell. Preferably, the amount of C4A and/or C4B protein is decreased as compared to a control. In some embodiments, the decrease in amount of C4A and/or C4B protein is at least 20%, at least 30%, as compared to a control. In some embodiments, the amount of C4A and/or C4B protein in the target cell is reduced by at least 50%, e.g., 50-60%, or at least 60%, e.g., 60-70%, or at least 70%, e.g., 70-80%, at least 80%, e.g., 80-90%, or at least 90%, e.g., 90-95%, when compared to a control.

[0111] Sugar Modifications

[0112] The oligonucleotide of the invention may comprise one or more nucleosides, which have a modified sugar moiety, i.e. a modification of the sugar moiety when compared to the ribose sugar moiety found in DNA and RNA.

[0113] Numerous nucleosides with modification of the ribose sugar moiety have been made, primarily with the aim of improving certain properties of oligonucleotides, such as affinity and/or nuclease resistance.

[0114] Such modifications include those where the ribose ring structure is modified, e.g. by replacement with a hexose ring (HNA), or a bicyclic ring, which typically have a biradical bridge between the C2 and C4 carbons on the ribose ring (LNA), or an unlinked ribose ring which typically lacks a bond between the C2 and C3 carbons (e.g. UNA). Other sugar-modified nucleosides include, for example, bicyclohexose nucleic acids (WO2011/017521) or tricyclic nucleic acids (WO2013/154798). Modified nucleosides also include nucleosides where the sugar moiety is replaced with a non-sugar moiety, for example in the case of peptide nucleic acids (PNA), or morpholino nucleic acids.

[0115] Sugar modifications also include modifications made via altering one or more substituent groups on the ribose ring to groups other than hydrogen, or the 2′-OH group naturally found in DNA and RNA nucleosides. Substituents may, for example, be introduced at the 2′, 3′, 4′ or 5′ positions.

[0116] High Affinity Modified Nucleosides

[0117] A “high affinity modified nucleoside” is a modified nucleotide which, when incorporated into the oligonucleotide, enhances the affinity of the oligonucleotide for its complementary target, for example as measured by the melting temperature (Tm). A high affinity modified nucleoside of the present invention preferably results in an increase in melting temperature in the range of +0.5 to +12 C, more preferably in the range of +1.5 to +10° C. and most preferably in the range of +3 to +8° C. per modified nucleoside. Numerous high affinity modified nucleosides are known in the art and include for example, many 2′ substituted nucleosides as well as locked nucleic acids (LNA) (see e.g. Freier & Altmann; Nucl. Acid Res., 1997, 25, 4429-4443 and Uhlmann; Curr. Opinion in Drug Development, 2000, 3(2), 293-213).

[0118] 2′ Sugar Modified Nucleosides

[0119] A 2′ sugar modified nucleoside is a nucleoside which has a substituent other than H or —OH at the 2′ position (2′ substituted nucleoside) or comprises a 2′ linked biradical capable of forming a bridge between the 2′ carbon and a second carbon in the ribose ring, such as LNA (2′-4′ biradical bridged) nucleosides.

[0120] Indeed, much focus has been spent on developing 2′ sugar substituted nucleosides, and numerous 2′ substituted nucleosides have been found to have beneficial properties when incorporated into oligonucleotides. For example, the 2′ modified sugar may provide enhanced binding affinity and/or increased nuclease resistance to the oligonucleotide. Examples of 2′ substituted modified nucleosides are 2′-O-alkyl-RNA, 2′-O-methyl-RNA, 2′-alkoxy-RNA, 2′-O-methoxyethyl-RNA (MOE), 2′-amino-DNA, 2′-Fluoro-RNA, and 2′-F-ANA nucleoside. For further examples, please see e.g. Freier & Altmann; Nucl. Acid Res., 1997, 25, 4429-4443 and Uhlmann; Curr. Opinion in Drug Development, 2000, 3(2), 293-213, and Deleavey and Damha, Chemistry and Biology 2012, 19, 937. Below are illustrations of some 2′ substituted modified nucleosides.

[chemical structure]

[0121] In relation to the present invention, a 2′ substituted sugar modified nucleoside does not include 2′ bridged nucleosides like LNA.

[0122] Locked Nucleic Acid Nucleosides (LNA Nucleoside)

[0123] A “LNA nucleoside” is a 2′-modified nucleoside which comprises a biradical linking the C2′ and C4′ of the ribose sugar ring of said nucleoside (also referred to as a “2′-4′ bridge”), which restricts or locks the conformation of the ribose ring. These nucleosides are also termed bridged nucleic acids or bicyclic nucleic acids (BNAs) in the literature. The locking of the conformation of the ribose is associated with an enhanced affinity of hybridization (duplex stabilization) when the LNA is incorporated into an oligonucleotide for a complementary RNA or DNA molecule. This can be routinely determined by measuring the melting temperature of the oligonucleotide/complement duplex.

[0124] Non limiting, exemplary LNA nucleosides are disclosed in WO 99/014226, WO 00/66604, WO 98/039352, WO 2004/046160, WO 00/047599, WO 2007/134181, WO 2010/077578, WO 2010/036698, WO 2007/090071, WO 2009/006478, WO 2011/156202, WO 2008/154401, WO 2009/067647, WO 2008/150729, Morita et al., Bioorganic & Med. Chem. Lett. 12, 73-76, Seth et al. J. Org. Chem. 2010, Vol 75(5) pp. 1569-81, and Mitsuoka et al., Nucleic Acids Research 2009, 37(4), 1225-1238, and Wan and Seth, J. Medical Chemistry 2016, 59, 9645-9667.

[0125] Particular examples of LNA nucleosides of the invention are presented in Scheme 1 (wherein B is as defined above).

[chemical structure]

[0126] Particular LNA nucleosides for use in molecules of the invention are beta-D-oxy-LNA, 6′-methyl-beta-D-oxy LNA such as (S)-6′-methyl-beta-D-oxy-LNA (ScET) and ENA. A particularly advantageous LNA is beta-D-oxy-LNA.

[0127] RNase H Activity and Recruitment

[0128] The RNase H activity of an antisense oligonucleotide refers to its ability to recruit RNase H when in a duplex with a complementary RNA molecule. WO01/23613, for example, provides in vitro methods for determining RNase H activity, which may be used to determine ability to recruit RNase H. Typically, an oligonucleotide is deemed capable of recruiting RNase H if it, when provided with a complementary target nucleic acid sequence, has an initial rate, as measured in pmol/l/min, of at least 5%, such as at least 10%-15% or more than 20%, e.g., 20-25%, or 20-30%, of the of the initial rate determined when using a oligonucleotide having the same base sequence as the modified oligonucleotide being tested, but containing only DNA monomers with phosphorothioate linkages between all monomers in the oligonucleotide, and using the methodology provided by Example 91-95 of WO 01/23613 (hereby incorporated by reference). For use in determining RNase H activity, recombinant human RNase H1 is available from Creative Biomart® (Recombinant Human RNase H1 fused with His tag expressed in E. coli).

[0129] Gapmer

[0130] The antisense oligonucleotide of the invention, or contiguous nucleotide sequence thereof, may be a gapmer, also termed gapmer oligonucleotide or gapmer designs. Antisense gapmers are commonly used to inhibit a target nucleic acid via RNase H mediated degradation. A gapmer oligonucleotide comprises at least three distinct structural regions: a 5′-flank, a gap, and a 3′-flank, F-G-F′ in the ‘5->3’ orientation. The “gap” region (G) comprises a stretch of contiguous DNA nucleotides, which enable the oligonucleotide to recruit RNase H. The gap region is flanked by a 5′ flanking region (F) comprising one or more sugar modified nucleosides, advantageously high affinity sugar modified nucleosides, and by a 3′ flanking region (F′) comprising one or more sugar modified nucleosides, advantageously high affinity sugar modified nucleosides. The one or more sugar modified nucleosides in region F and F′ enhance the affinity of the oligonucleotide for the target nucleic acid (i.e. are affinity enhancing sugar modified nucleosides). In some embodiments, the one or more sugar modified nucleosides in region F and F′ are 2′ sugar modified nucleosides, such as high affinity 2′ sugar modifications, such as independently selected from LNA and 2′-MOE.

[0131] In a gapmer design, the 5′ and 3′ most nucleosides of the gap region are DNA nucleosides, and are positioned adjacent to a sugar modified nucleoside of the 5′ (F) and/or 3′ (F′) region respectively. The flanks may further be defined by having at least one sugar modified nucleoside at the end most distant from the gap region, i.e. at the 5′ end of the 5′ flank and at the 3′ end of the 3′ flank.

[0132] Regions F-G-F′ form a contiguous nucleotide sequence. Antisense oligonucleotides of the invention, or the contiguous nucleotide sequence thereof, may comprise a gapmer region of formula F-G-F′.

[0133] The overall length of the gapmer design F-G-F′ may be, for example 12 to 32 nucleosides, such as 13 to 24, such as 14 to 22 nucleosides, such as 15 to 21 nucleosides.

[0134] By way of example, the gapmer oligonucleotide of the present invention can be represented by the following formulae:

F₁₋₈-G₅₋₁₆-F′₁₋₈,such as

F₁₋₈-G₇₋₁₆-F′₂₋₈

[0135] with the proviso that the overall length of the gapmer regions F-G-F′ is at least 12 (e.g., 12-15 nucleotides), such as at least 14 nucleotides (e.g., 14-20 nucleotides) in length.

[0136] In an aspect of the invention, the antisense oligonucleotide or contiguous nucleotide sequence thereof consists of or comprises a gapmer of formula 5′-F-G-F′-3′, where region F and F′ independently comprise or consist of 1-8 nucleosides, of which 1-4 are 2′ sugar modified and define the 5′ and 3′ ends of the F and F′ region, respectively, and G is a region between 6 and 16 nucleosides which are capable of recruiting RNaseH.

[0137] In an aspect of the invention, the antisense oligonucleotide or contiguous nucleotide sequence thereof consists of or comprises a gapmer of formula 5′-F-G-F′-3′, where region F and F′ independently comprise or consist of 1-8 nucleosides, of which 1-4 are 2′ sugar modified and define the 5′ and 3′ end of the F and F′ region, respectively, and G is a region between 6 and 18 nucleosides which are capable of recruiting RNase H. In some embodiments, the G region consists of DNA nucleosides.

[0138] In some embodiments, region F and F′ independently consists of or comprises a contiguous sequence of sugar-modified nucleosides. In some embodiments, the sugar modified nucleosides of region F may be independently selected from 2′-O-alkyl-RNA units, 2′-O-methyl-RNA, 2′-amino-DNA units, 2′-fluoro-DNA units, 2′-alkoxy-RNA, MOE units, LNA units, arabino nucleic acid (ANA) units and 2′-fluoro-ANA units.

[0139] In some embodiments, region F and F′ independently comprises both LNA and a 2′-substituted sugar modified nucleotide (mixed wing design). In some embodiments, the 2′-substituted sugar modified nucleotide is independently selected from the group consisting of 2′-O-alkyl-RNA units, 2′-O-methyl-RNA, 2′-amino-DNA units, 2′-fluoro-DNA units, 2′-alkoxy-RNA, MOE units, arabino nucleic acid (ANA) units and 2′-fluoro-ANA units.

[0140] In some embodiments, all the modified nucleosides of region F and F′ are LNA nucleosides, such as independently selected from beta-D-oxy LNA, ENA or ScET nucleosides, wherein region F or F′, or F and F′ may optionally comprise DNA nucleosides. In some embodiments, all the modified nucleosides of region F and F′ are beta-D-oxy LNA nucleosides, wherein region F or F′, or F and F′ may optionally comprise DNA nucleosides. In such embodiments, the flanking region F or F′, or both F and F′ comprise at least three nucleosides, wherein the 5′ and 3′ most nucleosides of the F and/or F′ region are LNA nucleosides.

[0141] LNA Gapmer

[0142] An “LNA gapmer” is a gapmer wherein either one or both of region F and F′ comprises or consists of LNA nucleosides. A beta-D-oxy gapmer is a gapmer wherein either one or both of region F and F′ comprises or consists of beta-D-oxy LNA nucleosides.

[0143] In some embodiments, the LNA gapmer is of formula: [LNA]₁₋₅-[region G]₆₋₁₈-[LNA]₁₋₅, wherein region G is as defined in the Gapmer region G definition.

[0144] MOE Gapmers

[0145] An “MOE gapmer” is a gapmer wherein regions F and F′ consist of MOE (methoxyethy) nucleosides. In some embodiments, the MOE gapmer is of design [MOE]₁₋₈-[Region G]₅₋₁₆-[MOE]₁₋₈, such as [MOE]₂₋₇-[Region G]₆₋₁₄-[MOE]₂₋₇, such as [MOE]₃₋₆-[Region G]₈₋₁₂-[MOE]₃₋₆, such as [MOE]₅-[Region G]₁₀-[MOE]₅ wherein region G is as defined in the Gapmer definition. MOE gapmers with a 5-10-5 design (MOE-DNA-MOE) have been widely used in the art.

[0146] Region D′ or D″ in an Oligonucleotide

[0147] The oligonucleotide of the invention may in some embodiments comprise or consist of the contiguous nucleotide sequence of the oligonucleotide which is complementary to the target nucleic acid, such as a gapmer region F-G-F′, and may further comprise 5′ and/or 3′ nucleosides. The further 5′ and/or 3′ nucleosides may or may not be fully complementary to the target nucleic acid. Such further 5′ and/or 3′ nucleosides may be referred to as region D′ and D″ herein.

[0148] The addition of region D′ or D″ may be used for the purpose of joining the contiguous nucleotide sequence, such as the gapmer, to a conjugate moiety or another functional group. When used for joining the contiguous nucleotide sequence with a conjugate moiety is can serve as a biocleavable linker. Alternatively, it may be used to provide exonucleoase protection or for ease of synthesis or manufacture.

[0149] Region D′ and D″ can be attached to the 5′ end of region F or the 3′ end of region F′, respectively, to generate designs of the following formulas D′-F-G-F′, F-G-F′-D″ or D′-F-G-F′-D″. In this instance, the F-G-F′ is the gapmer portion of the oligonucleotide and region D′ or D″ constitute a separate part of the oligonucleotide.

[0150] Region D′ or D″ may independently comprise or consist of 1, 2, 3, 4 or 5 additional nucleotides, which may be complementary or non-complementary to the target nucleic acid. In some embodiment, the nucleotide adjacent to the F or F′ region is not a sugar-modified nucleotide, such as a DNA or RNA or base modified versions of these. The D′ or D′ region may serve as a nuclease susceptible biocleavable linker (see definition of linkers). In some embodiments, the additional 5′ and/or 3′ end nucleotides are linked with phosphodiester linkages, and are DNA or RNA. Nucleotide based biocleavable linkers suitable for use as region D′ or D″ are disclosed, for example, in WO2014/076195, which include by way of example a phosphodiester linked DNA dinucleotide. The use of biocleavable linkers in poly-oligonucleotide constructs is disclosed, for example, in WO2015/113922, where they are used to link multiple antisense constructs (e.g. gapmer regions) within a single oligonucleotide.

[0151] In one embodiment, the oligonucleotide of the invention comprises a region D′ and/or D″ in addition to the contiguous nucleotide sequence which constitutes the gapmer.

[0152] In some embodiments, the oligonucleotide of the present invention can be represented by one or more of the following formulae:

F-G-F′; in particular F₁₋₈-G₅₋₁₈-F′₂₋₈

D′-F-G-F′, in particular D′₁₋₃-F₁₋₈-G₅₋₁₈-F′₂₋₈

F-G-F′-D″, in particular F₁₋₈-G₅₋₁₈-F′₂₋₈-D″₁₋₃

D′-F-G-F′-D″, in particular D′₁₋₃-F₁₋₈-G₅₋₁₈-F′₂₋₈-D″₁₋₃

[0153] In some embodiments the internucleoside linkage positioned between region D′ and region F is a phosphodiester linkage. In some embodiments the internucleoside linkage positioned between region F′ and region D″ is a phosphodiester linkage.

[0154] Treatment

[0155] The term “treatment” as used herein refers to both treatment of an existing disease (e.g. a disease or disorder as herein referred to), or prevention of a disease, i.e. prophylaxis. Prophylaxis also includes delaying or reducing the likelihood of disease occurrence, delaying or reducing frequency of relapse of the disease, and/or reducing severity or duration of the disease if the subject eventually succumbs to the disease. It will therefore be recognized that treatment as referred to herein may, in some embodiments, be prophylactic. In some embodiments, treatment is performed on a patient who has been diagnosed with a complement mediated neurological disease, such as a neurological disease selected from the group consisting of Alzheimer's disease, frontotemporal dementia, multiple sclerosis, amyotrophic lateral sclerosis, Huntington's disease, Parkinson's disease, virus-induced cognitive impairment, glaucoma, macular degeneration, myasthenia gravis, Guillain-Barré syndrome, neuromyelitis optica, central nervous system lupus erythematosus, and schizophrenia. In some embodiments, the compounds of the invention are for use in the treatment of a tauopathy, such as Alzheimer's disease. In some embodiments, the compounds of the invention are for use in the treatment of schizophrenia.

[0156] Patient

[0157] For the purposes of the present invention, the “subject” (or “patient”) may be a vertebrate. In context of the present invention, the term “subject” includes both humans and other animals, particularly mammals, and other organisms. Thus, the herein provided means and methods are applicable to both human therapy and veterinary applications. Preferably, the subject is a mammal. More preferably, the subject is human.

[0158] As described elsewhere herein, the patient to be treated may suffer from or be susceptible to a neurological disease or neurodegenerative disorder. A patient “susceptible to” a disease or disorder is one who is pre-disposed thereto and/or otherwise at risk of developing or having a recurrence of the disease or disorder. A susceptible patient can be understood a patent likely to develop the disease or disorder, to the extent that the patient would benefit from prophylactic treatment or intervention.

[0159] By “neurological disease” is meant a disease or disorder of the nervous system including, but not limited to, neurological conditions associated with cancer, and neurodegenerative disease.

[0160] By “neurodegenerative disease” is meant diseases including, but not limited to Alzheimer's disease, frontotemporal dementia, multiple sclerosis, amyotrophic lateral sclerosis, Huntington's disease, Parkinson's disease, virus-induced cognitive impairment, glaucoma, macular degeneration, myasthenia gravis, Guillain-Barré syndrome, neuromyelitis optica, central nervous system lupus erythematosus, and schizophrenia. In some embodiments, the patient to be treated suffers from a tauopathy, such as Alzheimer's disease. In some embodiments, the patient to be treated suffers from schizophrenia.

[0161] Alzheimer's disease (AD), also referred to as Alzheimer disease or “Alzheimer's,” is a chronic neurodegenerative disorder typically characterized by progressive cognitive deterioration, as well as increasing memory loss, problems with language, judgment, and/or problem solving, and that can lead to inability to perform daily tasks, and eventually dementia.

### DETAILED DESCRIPTION OF THE INVENTION

[0162] Synapse removal and neuronal damage can be mediated by the classical pathway of the complement system, which is initiated by activation of the C1 complex (consisting of C1Q, C1S and C1R), leading to cleavage of C2 and C4, which in turn lead to cleavage of C3 which can trigger phagocytosis as well as inflammation and further downstream complement activation. In the context of the present invention, the present inventors have shown that nucleic acid molecules, such as antisense oligonucleotides, inhibit the expression of C4A and/or C4B. Reduced expression of C4 can lead to reduced cleavage of C3 and thereby to reduced engulfment of synapses by microglia cells and other harmful effects of complement activation.

[0163] One aspect of the present invention is a C4 inhibitor for use in the treatment and/or prevention of a neurological disease, in particular a neurological disease selected from a tauopathy and schizophrenia. In some embodiments, the tauopathy is Alzheimer's disease. The C4 inhibitor can for example be a small molecule that specifically binds to a C4 protein, wherein said inhibitor prevents or reduces cleavage of the C4 protein.

[0164] An embodiment of the invention is a C4 inhibitor, which is capable of preventing or reducing expression of C4A protein and/or C4B protein thereby leading to reduced cleavage of C3. In some embodiments, the C4 inhibitor leads to inhibition of engulfment of synapses by microglia cells.

[0165] C4 Inhibitors for Use in Treatment of Neurological Diseases

[0166] Without being bound by theory, it is believed that C4 is involved in the in the cleavage of C3 and thereby in the engulfment of synapses by microglia cells.

[0167] In some embodiments of the present invention, the inhibitor is small molecule compound. In some embodiments, the inhibitor may be a small molecule that specifically binds to the C4A and/or C4B protein. In some embodiments, the C4A protein is encoded by a sequence selected from SEQ ID NO: 3, 5, and 6. In some embodiments, the C4B protein is encoded by a sequence selected from SEQ ID NO: 4, 5, and 7.

[0168] Nucleic Acid Molecules of the Invention

[0169] Therapeutic nucleic acid molecules find use as C4 inhibitors since they can target C4 transcripts and promote their degradation, e.g., either via the RNA interference pathway or via RNase H cleavage. Alternatively, oligonucleotides such as aptamers can also act as inhibitors of C4 proteins.

[0170] One aspect of the present invention is a C4 targeting nucleic acid molecule for use in treatment and/or prevention of Neurological diseases. Such a nucleic acid molecule can be selected from the group consisting of a single stranded antisense oligonucleotide, an siRNA, and a shRNA.

[0171] The present section describes novel nucleic acid molecules suitable for use in treatment and/or prevention of a neurological disease. In some embodiments, the neurological disease is selected from the group consisting of Alzheimer's disease, frontotemporal dementia, multiple sclerosis, amyotrophic lateral sclerosis, Huntington's disease, Parkinson's disease, virus-induced cognitive impairment, glaucoma, macular degeneration, myasthenia gravis, Guillain-Barre syndrome, neuromyelitis optica, central nervous system lupus erythematosus, and schizophrenia. In some embodiments, the neurological disease is a tauopathy, such as Alzheimer's disease. In some embodiments, the neurological disease is schizophrenia.

[0172] The nucleic acid molecules of the present invention are capable of inhibiting C4 mRNA and/or expression of C4 protein in vitro and in vivo. The inhibition can be achieved by hybridizing an oligonucleotide to a target nucleic acid encoding a C4A and/or C4B protein. In some embodiments, the target nucleic acid may be a mammalian C4A sequence. In some embodiments, the target nucleic acid may be a human C4A pre-mRNA sequence such as the sequence of SEQ ID NO: 3 or a human mature C4A mRNA sequence such as the sequence of SEQ ID NO: 6. In some embodiments, the target nucleic acid may be a mammalian C4B sequence. In some embodiments, the target nucleic acid may be a human C4B pre-mRNA sequence such as the sequence of SEQ ID NO: 4 or a human mature C4B mRNA sequence such as the sequence of SEQ ID NO: 7. In some embodiments, the target nucleic acid may be a cynomolgus monkey C4 sequence such as the sequence of SEQ ID NO: 5.

[0173] In some embodiments, the nucleic acid molecule of the invention is capable of modulating the expression of the target by inhibiting or down-regulating it. Preferably, such modulation produces an inhibition of expression of at least 20% (e.g., 20-30%) compared to the normal expression level of the target, more preferably at least 30% (e.g., 30-40%), at least 40% (e.g., 40-50%), or at least 50% (e.g., 50-60%), inhibition compared to the normal expression level of the target. In some embodiments, the nucleic acid molecule of the invention may be capable of inhibiting expression levels of C4 mRNA by at least 50% (e.g., 50-60%) or 60% (e.g., 50-60%) in vitro by using 20-50 nM nucleic acid molecule for transfection. In some embodiments, the nucleic acid molecule of the invention may be capable of inhibiting expression levels of C4 mRNA by at least 50% (e.g., 50-60%) or 60% (e.g., 50-60%) in vitro by using 50-350 nM nucleic acid molecule for gymnosis. Suitably, the examples provide assays, which may be used to measure C4 mRNA inhibition (e.g. Example 1 and the “Materials and Methods” section). C4 inhibition is triggered by the hybridization between a contiguous nucleotide sequence of the oligonucleotide, such as the guide strand of a siRNA or gapmer region of an antisense oligonucleotide, and the target nucleic acid. In some embodiments, the nucleic acid molecule of the invention comprises mismatches between the oligonucleotide and the target nucleic acid. Despite mismatches, hybridization to the target nucleic acid may still be sufficient to show a desired inhibition of C4 expression. Reduced binding affinity resulting from mismatches may advantageously be compensated by increased number of nucleotides in the oligonucleotide complementary to the target nucleic acid and/or an increased number of modified nucleosides capable of increasing the binding affinity to the target, such as 2′ sugar modified nucleosides, including LNA, present within the oligonucleotide sequence.

[0174] An aspect of the present invention relates to a nucleic acid molecule of 12 to 60 nucleotides in length, which comprises a contiguous nucleotide sequence of at least 12 nucleotides in length, such as at least 12 to 30 nucleotides in length, which is at least 95% complementary, such as fully complementary, to a mammalian C4 target nucleic acid, in particular a human C4 mRNA. These nucleic acid molecules are capable of inhibiting the expression of C4 mRNA and/or C4 protein.

[0175] An aspect of the invention relates to a nucleic acid molecule of 12 to 30 nucleotides in length, comprising a contiguous nucleotide sequence of at least 12 nucleotides, such as 12 to 30, or such as 15 to 21 nucleotides in length, which is at least 90% complementary, such as fully complementary, to a mammalian C4 target sequence.

[0176] A further aspect of the present invention relates to a nucleic acid molecule according to the invention comprising a contiguous nucleotide sequence of 14 to 22, such as 15 to 21 nucleotides in length with at least 90% complementary, such as fully complementary, to the target sequence of SEQ ID NO: 3 and/or 4.

[0177] In some embodiments, the nucleic acid molecule comprises a contiguous sequence of 12 to 30 nucleotides in length, which is at least 90% complementary, such as at least 91%, such as at least 92%, such as at least 93%, such as at least 94%, such as at least 95%, such as at least 96%, such as at least 97%, such as at least 98%, or 100% complementary with a region of the target nucleic acid or a target sequence.

[0178] It is advantageous if the oligonucleotide, or contiguous nucleotide sequence thereof, is fully complementary (100% complementary) to a region of the target sequence, or in some embodiments may comprise one or two mismatches between the oligonucleotide and the target sequence.

[0179] In some embodiments, the oligonucleotide sequence is 100% complementary to a region of the target sequence of SEQ ID NO: 3 and/or 4. In some embodiments, the oligonucleotide sequence is 100% complementary to a region of the target sequence of SEQ ID NO: 6 and/or 7.

[0180] In some embodiments, the nucleic acid molecule or the contiguous nucleotide sequence of the invention is at least 90% or 95% complementary, such as fully (or 100%) complementary, to the target nucleic acid of SEQ ID NO: 3 and/or 4.

[0181] In some embodiments, the oligonucleotide or the contiguous nucleotide sequence of the invention is at least 90% or 95% complementary, such as fully (or 100%) complementary, to the target nucleic acid of SEQ ID NO: 5 and/or SEQ ID NO: 6 and 7.

[0182] In some embodiments, the oligonucleotide or the contiguous nucleotide sequence of the invention is at least 90% or 95% complementary, such as fully (or 100%) complementary, to the target nucleic acid of SEQ ID NO: 1 and 2, and/or SEQ ID NO: 3 and 4, and/or SEQ ID NO: 5.

[0183] In some embodiments, the contiguous sequence of the nucleic acid molecule of the present invention is least 90% complementary, such as fully complementary to a region of SEQ ID NO: 3 and/or 4, selected from the group consisting of target regions 1A to 297A as shown in Table 4a and/or regions 1B to 297B as shown in Table 4b.

[0184] In some embodiments, the nucleic acid molecule of the invention comprises or consists of 12 to 60 nucleotides in length, such as from 13 to 50, such as from 14 to 35, such as 15 to 30, such as from 15 to 21 contiguous nucleotides in length. In a preferred embodiment, the nucleic acid molecule comprises or consists of 15, 16, 17, 18, 19, 20 or 21 nucleotides in length.

[0185] In some embodiments, the contiguous nucleotide sequence of the nucleic acid molecule, which is complementary to the target nucleic acids, comprises or consists of 12 to 30, such as from 13 to 25, such as from 15 to 21 contiguous nucleotides in length.

[0186] In some embodiments, the oligonucleotide is selected from the group consisting of an antisense oligonucleotide, an siRNA and a shRNA.

[0187] In some embodiments, the contiguous nucleotide sequence of the siRNA or shRNA, which is complementary to the target sequence, comprises or consists of 18 to 28, such as from 19 to 26, such as from 20 to 24, such as from 21 to 23, contiguous nucleotides in length.

[0188] In some embodiments, the contiguous nucleotide sequence of the antisense oligonucleotide, which is complementary to the target nucleic acids, comprises or consists of 12 to 22, such as from 14 to 21, such as from 15 to 21 such as from 15, 16, 17, 18, 19, 20, or 21 contiguous nucleotides in length.

[0189] In some embodiments, the oligonucleotide or contiguous nucleotide sequence comprises or consists of a sequence selected from the group consisting of sequences listed in Table 7.

[0190] It is understood that the contiguous oligonucleotide sequence (motif sequence) can be modified to, for example, increase nuclease resistance and/or binding affinity to the target nucleic acid.

[0191] The pattern in which the modified nucleosides (such as high affinity modified nucleosides) are incorporated into the oligonucleotide sequence is generally termed oligonucleotide design.

[0192] The nucleic acid molecule of the invention may be designed with modified nucleosides and RNA nucleosides (in particular for siRNA and shRNA molecules) or DNA nucleosides (in particular for single stranded antisense oligonucleotides).

[0193] In advantageous embodiments, the nucleic acid molecule or contiguous nucleotide sequence comprises one or more sugar modified nucleosides, such as 2′ sugar modified nucleosides, such as comprise one or more 2′ sugar modified nucleoside independently selected from the group consisting of 2′-O-alkyl-RNA, 2′-O-methyl-RNA, 2′-alkoxy-RNA, 2′-O-methoxyethyl-RNA, 2′-amino-DNA, 2′-fluoro-DNA, arabino nucleic acid (ANA), 2′-fluoro-ANA and LNA nucleosides. It is advantageous if one or more of the modified nucleoside(s) is a locked nucleic acid (LNA).

[0194] In some embodiments, the contiguous nucleotide sequence comprises LNA nucleosides.

[0195] In some embodiments, the contiguous nucleotide sequence comprises LNA nucleosides and DNA nucleosides.

[0196] In some embodiments, the contiguous nucleotide sequence comprises 2′-O-methoxyethyl (2′MOE) nucleosides.

[0197] In some embodiments, the contiguous nucleotide sequence comprises 2′-O-methoxyethyl (2′MOE) nucleosides and DNA nucleosides.

[0198] Advantageously, the 3′ most nucleoside of the antisense oligonucleotide, or contiguous nucleotide sequence thereof, is a 2′sugar modified nucleoside.

[0199] In a further embodiment, the nucleic acid molecule comprises at least one modified internucleoside linkage. Suitable internucleoside modifications are described in the “Definitions” section under “Modified internucleoside linkage”.

[0200] Advantageously, the oligonucleotide comprises at least one modified internucleoside linkage, such as phosphorothioate or phosphorodithioate.

[0201] In some embodiments, at least one internucleoside linkage in the contiguous nucleotide sequence is a phosphodiester internucleoside linkage.

[0202] It is advantageous if at least 2 to 3 internucleoside linkages at the 5′ or 3′ end of the oligonucleotide are phosphorothioate internucleoside linkages.

[0203] For single stranded antisense oligonucleotides, it is advantageous if at least 75%, such as 70-80%, at least 90%, such as 90-95%, or all, the internucleoside linkages within the contiguous nucleotide sequence are phosphorothioate internucleoside linkages. In some embodiments, all the internucleotide linkages in the contiguous sequence of the single stranded antisense oligonucleotide are phosphorothioate linkages.

[0204] In an advantageous embodiment of the invention, the antisense oligonucleotide of the invention is capable of recruiting RNase H, such as RNase H1. An advantageous structural design is a gapmer design as described in the “Definitions” section under for example “Gapmer”, “LNA Gapmer” and

[0205] “MOE gapmer”. In the present invention, it is advantageous if the antisense oligonucleotide of the invention is a gapmer with an F-G-F′ design.

[0206] In some embodiments, the F-G-F′ design may further include region D′ and/or D″ as described in the “Definitions” section under “Region D′ or D” in an oligonucleotide”.

[0207] In some embodiments, the inhibitor of the present invention is a nucleic acid capable of inducing the process of RNA interference (as described, e.g., in WO 2014/089121).

[0208] Method of Manufacture

[0209] In a further aspect, the invention provides methods for manufacturing the oligonucleotide of the invention. In some embodiments, the method comprises reacting nucleotide units and thereby forming covalently linked contiguous nucleotide units comprised in the oligonucleotide in a sequence according to a nucleic acid molecule of the present invention. Preferably, the method uses phophoramidite chemistry (see for example Caruthers et al, 1987, Methods in Enzymology vol. 154, pages 287-313).

[0210] The manufactured oligonucleotides may comprise one or more modifications as described herein. For example, the manufactured oligonucleotides may comprise one or more sugar-modified nucleosides, one or more modified internucleoside linkages and/or one or more modified nucleobases. Accordingly, the method for manufacturing the oligonucleotide of the invention may further comprise the introduction of such modifications into the oligonucleotide.

[0211] In some embodiments, one or more modified internucleoside linkages, such as phosphorothioate internucleoside linkages, may be introduced into the oligonucleotide. In some embodiments, one or more sugar-modified nucleosides, such as 2′ sugar modified nucleosides, may be introduced. In some embodiments, one or more high affinity modified nucleosides and/or one or more LNA nucleosides may be introduced into the oligonucleotide. In some embodiments, region D′ and/or D″ as described elsewhere herein are added to the oligonucleotide.

[0212] In a further aspect, a method is provided for manufacturing the pharmaceutical composition of the invention, comprising mixing the oligonucleotides of the invention with a pharmaceutically acceptable diluent, solvent, carrier, salt and/or adjuvant.

[0213] As described elsewhere herein in more detail, the oligonucleotide of the invention may exist in the form of its pharmaceutically acceptable salts, esters, solvates or in the form of prodrugs. Accordingly, methods are provided for manufacturing the oligonucleotide of the invention in such forms.

[0214] Pharmaceutically Salts

[0215] The compounds according to the present invention may exist in the form of their pharmaceutically acceptable salts. The term “pharmaceutically acceptable salt” refers to conventional acid-addition salts or base-addition salts that retain, or substantially retain, the biological effectiveness and properties of the compounds of the present invention. By way of example, the following salts may be mentioned: Alkaline metal salts such as sodium salts, potassium salts or lithium salts; alkaline earth metal salts such as calcium salts or magnesium salts: metal salts such as aluminum salts, iron salts, zinc salts, copper salts; amine salts including inorganic salts such as ammonium salts and organic salts such as t-octylamine salts, dibenzylamine salts, morpholine salts, glucosamine salts, phenylglycine alkyl ester salts, ethylenediamine salts, N-methylglucamine salts, guanidine salts, diethylamine salts, triethylamine salts, dicyclohexylamine salts, dibenzylethylenediamine salts, chloroprocaine salts, procaine salts, diethanolamine salts, N-benzyl-phenethylamine salts, piperazine salts, tetramethylammonium salts or tris(hydroxymethyl)aminomethane salts, inorganic acid salts including hydrohalogenic acid salts such as hydrofluorides, hydrochlorides, hydrobromides or hydroiodides, sulfates or phosphates; organic acid salts including lower alkane sulfonic acid salts such as methanesulfonates, trifluoromethanesulfonates or ethanesulfonates, arylsulfonic acid salts such as benzenesulfonates or p-toluenesulfonates, acetates, malates, fumarates, succinates, citrates, tartrates, oxalates or maleates; and amino acid salts such as glycine salts, lysine salts, arginine salts, ornithine salts, glutamic acid salts or aspartic acid salts. These salts may be prepared by known methods.

[0216] In a further aspect, the invention provides a pharmaceutically acceptable salt of the nucleic acid molecule of the invention, such as a pharmaceutically acceptable sodium salt, ammonium salt or potassium salt.

[0217] Solvates

[0218] The compounds according to the present invention may exist in the form of solvates. The term ‘solvate’ is used herein to describe a molecular complex comprising the oligonucleotide of the invention and one or more pharmaceutically acceptable solvent molecules, for example, ethanol or water. If the solvent is water, the solvate is a “hydrate”. Pharmaceutically acceptable solvates within the meaning of the present invention include hydrates and other solvates.

[0219] Prodrugs

[0220] Further, the compounds according to the present invention may be administered in the form of a prodrug. A prodrug is defined as a compound that undergoes transformations in vivo to yield the parent active drug. Because cell membranes are lipophilic in nature, cellular uptake of oligonucleotides is often reduced compared to neutral or lipophilic equivalents. One solution is to use a prodrug approach (see e.g. Crooke, R. M. (1998) in Crooke, S. T. Antisense research and Application. Springer-Verlag, Berlin, Germany, vol. 131, pp. 103-140). Examples of such prodrugs include, but are not limited to, amides, esters, carbamates, carbonates, ureides and phosphates. These prodrugs may be prepared by known methods.

[0221] Pharmaceutical Composition

[0222] In a further aspect, the invention provides pharmaceutical compositions comprising any of the compounds of the invention, in particular the aforementioned nucleic acid molecules or salts thereof and a pharmaceutically acceptable diluent, carrier, salt and/or adjuvant. A pharmaceutically acceptable diluent includes, but is not limited to, phosphate-buffered saline (PBS). Pharmaceutically acceptable salts include, but are not limited to, sodium and potassium salts. In some embodiments the pharmaceutically acceptable diluent is sterile phosphate buffered saline. In some embodiments, the nucleic acid molecule is used in the pharmaceutically acceptable diluent at a concentration of 50 to 300 μM solution. Suitable formulations for use in the present invention are found in Remington's Pharmaceutical Sciences, Mack Publishing Company, Philadelphia, Pa., 17th ed., 1985. For a brief review of methods for drug delivery, see, e.g., Langer (Science 249:1527-1533, 1990). WO 2007/031091, e.g., provides further suitable and preferred examples of pharmaceutically acceptable diluents, carriers and adjuvants (hereby incorporated by reference). Suitable dosages, formulations, administration routes, compositions, dosage forms, combinations with other therapeutic agents, pro-drug formulations, and the like, are also provided, e.g., in WO2007/031091. In some embodiments, the nucleic acid molecule of the invention, or pharmaceutically acceptable salt thereof is in a solid form, such as a powder, such as a lyophilized powder. Compounds or nucleic acid molecules of the invention may be mixed with pharmaceutically acceptable active or inert substances for the preparation of pharmaceutical compositions or formulations. Compositions and methods for the formulation of pharmaceutical compositions are dependent upon a number of criteria, including, but not limited to, route of administration, extent of disease, or dose to be administered. These compositions may be sterilized by conventional sterilization techniques, or may be sterile filtered. The resulting aqueous solutions may be packaged for use as is, or lyophilized, the lyophilized preparation being combined with a sterile aqueous carrier prior to administration. The pH of the preparations typically will be between 3 and 11, more preferably between 5 and 9 or between 6 and 8, and most preferably between 7 and 8, such as 7 to 7.5. The resulting compositions in solid form may be packaged in multiple single dose units, each containing a fixed amount of the above-mentioned agent or agents, such as in a sealed package of tablets or capsules. The composition in solid form can also be packaged in a container for a flexible quantity, such as in a squeezable tube designed for a topically applicable cream or ointment.

[0223] Administration

[0224] The oligonucleotides or pharmaceutical compositions of the present invention may be administered via parenteral (such as, intravenous, subcutaneous, intra-muscular, intranasal, intracerebral, intracerebroventricular intraocular, or intrathecal administration).

[0225] In some embodiments, the administration is via intrathecal administration, e.g., by lumbar puncture.

[0226] Advantageously, e.g. for treatment of neurological disorders, the oligonucleotide or pharmaceutical compositions of the present invention are administered intrathecally or intracranially, e.g. via intracerebral or intraventricular administration.

[0227] The invention also provides for the use of the oligonucleotide or conjugate thereof, such as pharmaceutical salts or compositions of the invention, for the manufacture of a medicament wherein the medicament is in a dosage form for subcutaneous administration.

[0228] The invention also provides for the use of the oligonucleotide of the invention, or conjugate thereof, such as pharmaceutical salts or compositions of the invention, for the manufacture of a medicament wherein the medicament is in a dosage form for intrathecal administration.

[0229] In some embodiments, a therapeutically or prophylactically effective amount of the oligonucleotide or pharmaceutical composition of the present invention is administered.

[0230] Delivery Platforms

[0231] Delivery of the oligonucleotides to the target tissue may be enhanced by carrier-mediated delivery including, but not limited to, cationic liposomes, cyclodextrins, porphyrin derivatives, branched chain dendrimers, polyethylenimine polymers, nanoparticles, cell-penetrating peptides, and microspheres (see e.g. Dass, C R. J Pharm Pharmacol 2002; 54(1):3-27).

[0232] In some embodiments, the inhibitors of the present invention, such as the oligonucleotides of the present invention, are targeted to the brain. For example, delivery to the brain might be achieved by conjugating said inhibitor to a moiety that facilitates delivery across the blood brain barrier, such as an antibody or antibody fragment targeting the transferrin receptor.

[0233] Combination Therapies

[0234] In some embodiments, the inhibitor of the present invention such as the nucleic acid molecule, nucleic acid molecule conjugate, pharmaceutically acceptable salt, or pharmaceutical composition of the invention is for use in a combination treatment with another therapeutic agent. The therapeutic agent can for example be the standard of care for the diseases or disorders described above.

[0235] By way of example, the inhibitor of the present invention may be used in combination with other actives, such as oligonucleotide-based therapeutic agents—such as sequence specific oligonucleotide-based therapeutic agents—acting through nucleotide sequence-dependent mode of action.

[0236] By way of further example, the inhibitor of the present invention may be used in combination with one or more acetylcholinesterase inhibitors and/or one or more NMDA receptor antagonists. A cholinesterase inhibitor may be, for example, donepezil, tacrine, galantamine or rivastigmine. A NMDA receptor antagonist may be, for example, memantine.

[0237] By way of further example, the inhibitor of the present invention may be used in combination with one or more typical antipsychotics and/or one or more atypical antipsychotics. A typical antipsychotic may be, for example, chlorpromazine, fluphenazine, haloperidol, perphenazine, thioridazine, thiothixene, or trifluoperazine. An atypical antipsychotic may be, for example, aripiprazole, aripiprazole lauroxil, asenapine, brexpiprazole, cariprazine, clozapine, Iloperidone, lumateperone tosylate, lurasidone, olanzapine, paliperidone, aliperidone palmitate, or ziprasidone.

[0238] In some embodiments, the inhibitor of the present invention is used in combination with an antibody that binds to complement C4 or the C4b portion of C4 (e.g., as described in WO 2017/196969).

[0239] In some embodiments, the inhibitor of the present invention is used in combination with one or more of the following: an antisense compound that targets C9ORT72 (e.g., as described in WO 2014/062736); an antisense oligonucleotide, aptamer, miRNA, ribozyme, or siRNA that blocks expression of one or more of C3 convertase, C5, C6, C7, C8, and C9 (e.g., as described in WO 2008/044928); an antibody that blocks the activity of one or more of C3 convertase, C5, C6, C7, C8, and C9 (e.g., as described in WO 2008/044928); an antisense or double stranded RNA that decreases activity of the complement cascade (e.g., as described in WO 2005/060667); and an antibody that binds C1s protein, e.g., to inhibit proteolytic activity of C1s (e.g., as described in WO 2014/066744).

[0240] In some embodiments, the inhibitor of the present invention is used in combination with one or more nucleic acid molecules disclosed in U.S. Provisional application filed May 11, 2020, entitled “Complement Component C1R Inhibitors For Treating A Neurological Disease, And Related Compositions, Systems And Methods Of Using Same” and US Provisional application filed May 11, 2020, entitled “Complement Component C1S Inhibitors For Treating A Neurological Disease, And Related Compositions, Systems And Methods Of Using Same,”

[0241] Applications

[0242] The nucleic acid molecules of the invention may be utilized as research reagents for, for example, diagnostics, as well as for therapeutics and prophylaxis.

[0243] In research, such nucleic acid molecules may be used to specifically modulate the synthesis of a C4 protein in cells (e.g. in vitro cell cultures) and animal models thereby facilitating functional analysis of the target or an appraisal of its usefulness as a target for therapeutic intervention. Typically, the target modulation is achieved by degrading or inhibiting the mRNA corresponding to the protein, thereby preventing protein formation or by degrading or inhibiting a modulator of the gene or mRNA producing the protein.

[0244] If employing the nucleic acid molecules of the invention in research or diagnostics, the target nucleic acid may be a cDNA or a synthetic nucleic acid derived from DNA or RNA.

[0245] Methods of Detection or Diagnosis

[0246] Further encompassed by the present invention is a method for diagnosing a neurological disease in a patient suspected of a having a neurological disease, said method comprising the step of
[0247] a) determining the amount of one or more C4 nucleic acids, such as C4 mRNA or cDNA derived from C4 mRNA, in a sample from the subject, wherein the determination comprises contacting the sample with one or more oligonucleotides of the present invention,
[0248] b) comparing the amount determined in step a) to a reference amount, and
[0249] c) diagnosing whether the subject suffers from the neurological disease, or not, based on the results of step b).

[0250] In some embodiments, the method of diagnosing a neurological disease is an in vitro method.

[0251] The term “neurological disease” has been defined elsewhere herein. The definition applies accordingly. In some embodiments, the neurological disease to be diagnosed is a tauopathy, such as Alzheimer's disease. In some embodiments, the neurological disease to be diagnosed is schizophrenia.

[0252] The term “sample” refers to a sample of a body fluid, to a sample of separated cells or to a sample from a tissue or an organ. Samples of body fluids can be obtained by well-known techniques and include samples of blood, plasma, serum, urine, lymphatic fluid, sputum, ascites, saliva, and lacrimal fluid. In some embodiments, the sample is a cerebrospinal fluid sample.

[0253] Tissue or organ samples may be obtained from any tissue or organ by, e.g., biopsy. In some embodiments, the sample is a neural tissue sample, such as a brain tissue sample or spinal cord sample.

[0254] In some embodiments, the sample comprises neuron, astrocytes, oligodendrocytes, and/or microglia cells.

[0255] The subject may be a mammal. In some embodiments, the subject is a human. In some embodiments, the subject is a human. In some embodiments, the subject is a cynomolgus monkey.

[0256] In step a) of the aforementioned method, the amount of C4 nucleic acid present in the sample shall be determined. The C4 nucleic acid to be determined shall be a nucleic acid encoding a C4 protein, such as a C4A or C4B protein. In some embodiments, the C4 nucleic acid is mammalian C4 nucleic acid. In some embodiments, the C4 nucleic acid is a human C4 nucleic acid, such as a human C4A or C4B nucleic acid.

[0257] The C4 nucleic acid may for example be a gene, a RNA, a mRNA, and pre-mRNA, a mature mRNA or a cDNA sequence. In an embodiment, the nucleic acid is a C4 mRNA, such as a C4A or C4B mRNA. In another embodiment, the C4 nucleic acid is cDNA derived from a C4 mRNA.

[0258] In step b) of aforementioned method, the amount of the C4 nucleic acid shall be compared to a reference, i.e. to a reference amount. The terms “reference amount” or “reference” are well understood by the skilled person. Suitable reference amounts can, in principle, be calculated for a cohort of subjects based on the average or mean values for a given biomarker by applying standard methods of statistics. A suitable reference shall allow for the diagnosis of the neurological disease. Accordingly, the reference shall allow for differentiating between a patient suffering from a neurological disease and a subject who is not suffering from a neurological disease. In some embodiments, the reference is a predetermined value.

[0259] In some embodiments, an amount of the one or more C4 nucleic acids larger than the reference amount is indicative for a patient suffering from a neurological disease, whereas an amount of the one or more C4 nucleic acids lower than the reference amount is indicative for a patient not suffering from neurological disease.

[0260] The determination of the amount of the one or more nucleic acids in step a) shall comprise contacting the sample with one or more oligonucleotides of the present invention. For example, the sample is contacted with said one or more oligonucleotides under conditions, which allow for the hybridization of said one or more oligonucleotides to the one or more C4 nucleic acids present in the sample (such as the C4 mRNA), thereby forming duplexes of said oligonucleotides and said C4 nucleic acids. In some embodiments, the amount of the one or more C4 nucleic acids is determined by determining the amount of the formed duplexes, e.g. via a detectable label. Accordingly, the one or more oligonucleotides to be used may comprise a detectable label.

[0261] Further encompassed by the present invention is a method for detecting one or more C4 nucleic acids in a sample, for example, in a sample as defined above. The method may comprise contacting the sample with one or more oligonucleotides of the present invention as described above. In some embodiments, the sample is from a patient having or suspected of a having a neurological disease.

[0262] Also encompassed by the present invention is an in vivo or in vitro method for modulating C4 expression in a target cell, which is expressing C4, said method comprising administering a nucleic acid molecule, conjugate compound, or pharmaceutical composition of the invention in an effective amount to said cell.

[0263] In some embodiments, the target cell is a mammalian cell, in particular a human cell. The target cell may be an in vitro cell culture or an in vivo cell forming part of a tissue in a mammal. In preferred embodiments, the target cell is present in the brain. The target cell may be a brain cell. In some embodiments, the brain cell is selected from the group consisting of a neuron, an astrocyte, an oligodendrocyte, and a microglia cell.

[0264] One aspect of the present invention is related to the nucleic acid molecules or pharmaceutical compositions of the invention for use as a medicament.

[0265] In an aspect of the invention, the C4 inhibitor, such as a nucleic acid molecule or pharmaceutical composition of the invention, is capable of reducing the amount of C4 in a cell expressing C4.

[0266] For example, a nucleic acid molecule that inhibits C4 expression may reduce the C4 protein in an affected cell by at least 50% (e.g., 50-60%), or at least 60% (e.g., 60-70%), or at least 70% (e.g., 70-80%), at least 80% (e.g., 80-90%), or at least 90% (e.g., 90-95%) reduction compared to controls. The controls may be untreated cells or animals, or cells or animals treated with an appropriate control.

[0267] Inhibition of C4 expression may be measured by RT-qPCR, e.g. as described in the Materials and Methods section.

[0268] Due to the decrease of C4 levels, the nucleic acid molecules or pharmaceutical compositions of the present invention can be used to inhibit development of or in the treatment of Neurological diseases.

[0269] Accordingly, one aspect of the present invention is related to use of an C4 inhibitor, such as the nucleic acid molecule or pharmaceutical compositions of the invention to decrease C4 protein in an individual having or susceptible to a neurological disease.

[0270] The subject to be treated with the C4 inhibitor, such as the nucleic acid molecules or pharmaceutical compositions of the invention (or who prophylactically receives nucleic acid molecules or pharmaceutical compositions of the present invention) is preferably a human, more preferably a human patient who has a neurological diseases, even more preferably a human patient having a tauopathy, even more preferably a human patient having Alzheimer's disease. In some embodiments, the human patient has schizophrenia.

[0271] Accordingly, the present invention relates to a method of treating Neurological diseases, wherein the method comprises administering an effective amount of a C4 inhibitor, such as a nucleic acid molecule or pharmaceutical composition of the invention. The present invention further relates to a method of preventing Neurological diseases. In one embodiment, the C4 inhibitors of the present invention is not intended for the treatment of Neurological diseases, only its prevention.

[0272] The invention also provides for the use of a C4 inhibitor, such as nucleic acid molecule or a pharmaceutical composition of the invention, for the manufacture of a medicament, in particular a medicament for use in the treatment of Neurological diseases. In preferred embodiments, the medicament is manufactured in a dosage form for intrathecal or intracranial administration.

[0273] In some embodiments, the subject to be treated does not have a cardiovascular disorder or disease (e.g., as described in WO 2014/089121). In some embodiments, the subject to be treated does not require treatment for pain (e.g., as described in WO 2005/060667).

[0274] The invention also provides for the use of the nucleic acid molecule or the pharmaceutical composition of the invention for the manufacture of a medicament wherein the medicament is in a dosage form for intravenous administration.

[0275] In some embodiments, C4 is C4A and/or C4B.

[0276] Kits

[0277] The invention also provides a kit containing the C4 inhibitor of the present invention, such as the nucleic acid molecule or pharmaceutical composition of the present invention, and instructions for administering the C4 inhibitor. The instructions may indicate that the C4 inhibitor may be used for the treatment of a neurological disease or neurodegenerative disorder as referred to herein, such as Alzheimer's disease or Schizophrenia.

[0278] The term “kit” as used herein refers to a packaged product comprising components with which to administer the C4 inhibitor of the present invention. The kit may comprise a box or container that holds the components of the kit. The kit can also include instructions for administering the C4 inhibitor of the present invention of the invention.

### EXAMPLES

[0279] Materials and Methods

### Example 1: Testing In Vitro Efficacy of Antisense Oligonucleotides Targeting C4 in Primary Mouse Hepatocytes

[0280] Cells were maintained in a humidified incubator as recommended by the supplier. The vendor and recommended culture conditions are reported in Table 5.

TABLE 5
Cell culture details.

| | | | Seeding | Incub. time | Incub. |
|---|---|---|---|---|---|
| | | | density | before oligo | time with |
| Cell Line | Vendor | Culture Condition | (cells/well) | (hrs) | oligo (hrs) |
| mouse | Minerva | WME (Sigma #W1878) w/FBS: | 25000 | 24 | 72 |
| hepatocytes | Imaging | complemented with 1x | | | |
| | | Pen/Strep/Glutamine (freshly | | | |
| | | added), 10% (v/v) FBS (Sigma | | | |
| | | F7524), non-heat inactivated. | | | |

[0281] For assays, cells were seeded in a 96-multi well plate in culture media and incubated as reported in Table 5 before addition of oligonucleotides dissolved in PBS. The seeding density of the cells is reported in Table 5.

[0282] Oligonucleotides were added at the concentrations reported in Table 8. The cells were harvested 72 hours after the addition of oligonucleotides (see Table 5). RNA was extracted using the RNeasy 96 kit (Qiagen) according to the manufacturer's instructions and eluted in 200 μL of water. The RNA was subsequently heated to 90° C. for one minute.

[0283] For gene expressions analysis, One Step RT-qPCR was performed using gScript™ XLT One-Step RT-qPCR ToughMix®, Low ROX™ (Quantabio) in a duplex set up. The primer assays used for qPCR are collated in Table 6 for both target and endogenous control.

TABLE 6
qPCR primer-probe details.

| | | Endogen. | | | |
|---|---|---|---|---|---|
| Endogen | Endog. contr. | contr. | | | Target |
| contr. assay | vendor | fluorophore | Target assay | Target vendor | fluorophore |
| RPLP0: | IDT | HEX-ZEN | C4: | Thermo | FAM-MGB |
| Rplp0_MmPT5843894205 | | | C4_Mm00550309_m1 | Scientific | |
| RPLP0: | IDT | HEX-ZEN | C4B: | Thermo | FAM-MGB |
| Rplp0_MmPT5843894205 | | | C4B_Mm00437890_m1 | Scientific | |

[0284] Provided herein are the following oligonucleotide compounds (Table 7):

TABLE 7
Oligonucleotide compounds

| | | | SEQ | | | | | |
|---|---|---|---|---|---|---|---|---|
| SEQ | | | ID | | CMP | | start_ | start_ |
| NO | Motif | Design | NO: | Compound | ID NO | ΔG° | C4a | C4b |
| 42 | CCAAATTAACCACAGAA | 4−10−3 | 303 | CCAAattaaccacaGAA | 264_1 | −19.8 | 243 | 240 |
| 43 | GTCCCCAAATTAACCACA | 2−14−2 | 304 | GTccccaaattaaccaCA | 265_1 | −22.9 | 246 | 243 |
| 44 | GTCCCCAAATTAACCAC | 2−12−3 | 305 | GTccccaaattaacCAC | 266_1 | −22.1 | 247 | 244 |
| 45 | TGATCCTTTTACCTCCT | 2−13−2 | 306 | TGatccttttacctcCT | 267_1 | −22.2 | 308 | 305 |
| 46 | ACTGATCCTTTTACCTC | 2−12−3 | 307 | ACtgatccttttacCTC | 268_1 | −21.5 | 310 | 307 |
| 47 | CACTGATCCTTTTACCTC | 2−14−2 | 308 | CActgatccttttaccTC | 269_1 | −21.8 | 310 | 307 |
| 48 | ACACTGATCCTTTTACCT | 2−14−2 | 309 | ACactgatccttttacCT | 270_1 | −21.3 | 311 | 308 |
| 49 | CACTGATCCTTTTACCT | 2−13−2 | 310 | CActgatccttttacCT | 271_1 | −20.9 | 311 | 308 |
| 50 | AACACTGATCCTTTTACCT | 2−15−2 | 311 | AAcactgatccttttacCT | 272_1 | −21 | 311 | 308 |
| 51 | CACTGATCCTTTTACC | 3−11−2 | 312 | CACtgatccttttaCC | 273_1 | −21.2 | 312 | 309 |
| 52 | AACACTGATCCTTTTACC | 2−14−2 | 313 | AAcactgatccttttaCC | 274_1 | −19.9 | 312 | 309 |
| 53 | ACACTGATCCTTTTACC | 2−13−2 | 314 | ACactgatccttttaCC | 275_1 | −20.2 | 312 | 309 |
| 54 | AGCACAAAGTCATCTCC | 2−13−2 | 315 | AGcacaaagtcatctCC | 276_1 | −20.8 | 388 | 385 |
| 55 | TCACATAACAAGCTCC | 4−10−2 | 316 | TCACataacaagctCC | 277_1 | −20.4 | 495 | 492 |
| 56 | CCTATGTCACATAACAA | 4−9−4 | 317 | CCTAtgtcacataACAA | 278_1 | −22.3 | 500 | 497 |
| 57 | GCCTATGTCACATAACA | 2−13−2 | 318 | GCctatgtcacataaCA | 279_1 | −20.5 | 501 | 498 |
| 58 | AGCCTATGTCACATAAC | 2−11−4 | 319 | AGcctatgtcacaTAAC | 280_1 | −20.4 | 502 | 499 |
| 59 | AGCAAAACTAAACAATAAAAC | 4−13−4 | 320 | AGCAaaactaaacaataAA | 281_1 | −17.7 | 603 | 600 |
| | | | | AC | | | | |
| 60 | AGCAAAACTAAACAATAAA | 4−11−4 | 321 | AGCAaaactaaacaaTAA | 282_1 | −17.2 | 605 | 602 |
| | | | | A | | | | |
| 61 | AATCTAGGTTACACCC | 2−11−3 | 322 | AAtctaggttacaCCC | 283_1 | −20.5 | 641 | 638 |
| 62 | CCGATAACGAACTAA | 4−7−4 | 323 | CCGAtaacgaaCTAA | 284_1 | −19.6 | 1281 | 1277 |
| 63 | ACCCGATAACGAACT | 3−8−4 | 324 | ACCcgataacgAACT | 285_1 | −20.2 | 1283 | 1279 |
| 64 | CGCATCTTTTGATCC | 3−10−2 | 325 | CGCatcttttgatCC | 286_1 | −21 | 1307 | 1303 |
| 65 | AAGTAAATATCTCCTTCTT | 3−12−4 | 326 | AAGtaaatatctcctTCTT | 287_1 | −21 | 1459 | 1455 |
| 66 | AAGTAAATATCTCCTTCT | 3−11−4 | 327 | AAGtaaatatctccTTCT | 288_1 | −20.2 | 1460 | 1456 |
| 67 | AAGTAAATATCTCCTTC | 3−10−4 | 328 | AAGtaaatatctcCTTC | 289_1 | −18.3 | 1461 | 1457 |
| 68 | GAAGTAAATATCTCCTTC | 4−11−3 | 329 | GAAGtaaatatctccTTC | 290_1 | −20 | 1461 | 1457 |
| 69 | ACCCATAGACAACTTTA | 3−12−2 | 330 | ACCcatagacaacttTA | 291_1 | −20 | 1726 | 1722 |
| 70 | CACCCATAGACAACTTTA | 2−14−2 | 331 | CAcccatagacaacttTA | 292_1 | −19.9 | 1726 | 1722 |
| 71 | CACCCATAGACAACTTT | 4−11−2 | 332 | CACCcatagacaactTT | 293_1 | −21.9 | 1727 | 1723 |
| 72 | CCACCCATAGACAACTT | 2−13−2 | 333 | CCacccatagacaacTT | 294_1 | −21.3 | 1728 | 1724 |
| 73 | CACCCATAGACAACTT | 3−11−2 | 334 | CACccatagacaacTT | 295_1 | −18.8 | 1728 | 1724 |
| 74 | CCACCCATAGACAACT | 2−12−2 | 335 | CCacccatagacaaCT | 296_1 | −21.1 | 1729 | 1725 |
| 75 | ACCCACCCATAGACAAC | 2−12−3 | 336 | ACccacccatagacAAC | 297_1 | −21.5 | 1730 | 1726 |
| 76 | AGCTACCCACCGACA | 2−11−2 | 337 | AGctacccaccgaCA | 298_1 | −22.3 | 1776 | 1772 |
| 77 | CATACTTCTTCACTTCAAA | 2−13−4 | 338 | CAtacttcttcacttCAAA | 299_1 | −20 | 1881 | 1877 |
| 78 | ACCATACTTCTTCACTTCAAA | 2−15−4 | 339 | ACcatacttcttcacttCAAA | 300_1 | −23.6 | 1881 | 1877 |
| 79 | ATACTTCTTCACTTCAAA | 3−11−2 | 340 | ATActtcttcacttCAAA | 301_1 | −19.6 | 1881 | 1877 |
| 80 | CACCATACTTCTTCACTTCAA | 2−17−2 | 341 | CAccatacttcttcacttcAA | 302_1 | −22.8 | 1882 | 1878 |
| 81 | CATACTTCTTCACTTCAA | 4−11−3 | 342 | CATActtcttcacttCAA | 303_1 | −22.1 | 1882 | 1878 |
| 82 | ACCATACTTCTTCACTTCAA | 2−16−2 | 343 | ACcatacttcttcacttcAA | 304_1 | −20.7 | 1882 | 1878 |
| 83 | CCATACTTCTTCACTTCAA | 2−15−2 | 344 | CCatacttcttcacttcAA | 305_1 | −20.9 | 1882 | 1878 |
| 34 | ACCATACTTCTTCACTTCA | 2−15−2 | 345 | ACcatacttcttcacttCA | 306_1 | −22.1 | 1883 | 1879 |
| 85 | CATACTTCTTCACTTCA | 3−12−2 | 346 | CATacttcttcacttCA | 307_1 | −20.2 | 1883 | 1879 |
| 86 | CCATACTTCTTCACTTCA | 2−14−2 | 347 | CCatacttcttcacttCA | 308_1 | −22.2 | 1883 | 1879 |
| 87 | ACCATACTTCTTCACTTC | 3−13−2 | 348 | ACCatacttcttcactTC | 309_1 | −21.9 | 1884 | 1880 |
| 88 | CACCATACTTCTTCACTTC | 2−15−2 | 349 | CAccatacttcttcactTC | 310_1 | −21.9 | 1884 | 1880 |
| 89 | ACCATACTTCTTCACTT | 4−11−2 | 350 | ACCAtacttcttcacTT | 311_1 | −21.9 | 1885 | 1881 |
| 90 | TCACCATACTTCTTCACTT | 3−14−2 | 351 | TCAccatacttcttcacTT | 312_1 | −22.9 | 1885 | 1881 |
| 91 | CACCATACTTCTTCACTT | 2−14−2 | 352 | CAccatacttcttcacTT | 313_1 | −20.4 | 1885 | 1881 |
| 92 | CACCATACTTCTTCACT | 2−13−2 | 353 | CAccatacttcttcaCT | 314_1 | −20.2 | 1886 | 1882 |
| 93 | TCACCATACTTCTTCACT | 3−13−2 | 354 | TCAccatacttcttcaCT | 315_1 | −22.7 | 1886 | 1882 |
| 94 | CACTCACCATACTTCTTCAC | 2−16−2 | 355 | CActcaccatacttcttcAC | 316_1 | −23.1 | 1887 | 1883 |
| 95 | TCACCATACTTCTTCAC | 4−11−2 | 356 | TCACcatacttcttcAC | 317_1 | −21 | 1887 | 1883 |
| 96 | ACTCACCATACTTCTTCA | 2−13−3 | 357 | ACtcaccatacttctTCA | 318_1 | −22.3 | 1888 | 1884 |
| 97 | CACTCACCATACTTCTTCA | 2−15−2 | 358 | CActcaccatacttcttCA | 319_1 | −23.2 | 1888 | 1884 |
| 98 | CTCACCATACTTCTTCA | 3−12−2 | 359 | CTCaccatacttcttCA | 320_1 | −21.8 | 1888 | 1884 |
| 99 | CACTCACCATACTTCTTC | 2−14−2 | 360 | CActcaccatacttctTC | 321_1 | −20.9 | 1889 | 1885 |
| 100 | CACTCACCATACTTCTT | 2−13−2 | 361 | CActcaccatacttcTT | 322_1 | −19.4 | 1890 | 1886 |
| 101 | GCACTCACCATACTTCT | 2−13−2 | 362 | GCactcaccatacttCT | 323_1 | −22.7 | 1891 | 1887 |
| 102 | TCAGCACTCACCATACTTC | 2−15−2 | 363 | TCagcactcaccatactTC | 324_1 | −22.8 | 1892 | 1888 |
| 103 | GCACTCACCATACTTC | 2−12−2 | 364 | GCactcaccatactTC | 325_1 | −20.2 | 1892 | 1888 |
| 104 | AGCACTCACCATACTTC | 2−13−2 | 365 | AGcactcaccatactTC | 326_1 | −20.4 | 1892 | 1888 |
| 105 | TCAGCACTCACCATACTT | 2−14−2 | 366 | TCagcactcaccatacTT | 327_1 | −21.4 | 1893 | 1889 |
| 106 | CAGCACTCACCATACTT | 2−13−2 | 367 | CAgcactcaccatacTT | 328_1 | −20.8 | 1893 | 1889 |
| 107 | AGCACTCACCATACTT | 2−12−2 | 368 | AGcactcaccatacTT | 329_1 | −19 | 1893 | 1889 |
| 108 | ACTTCAGCACTCACCAT | 2−12−3 | 369 | ACttcagcactcacCAT | 330_1 | −22.8 | 1897 | 1893 |
| 109 | GAGTAATCTTCACCTC | 2−11−3 | 370 | GAgtaatcttcacCTC | 331_1 | −19.6 | 2014 | 2010 |
| 110 | TAATTGGATTTCATCAC | 4−9−4 | 371 | TAATtggatttcaTCAC | 332_1 | −19.3 | 2066 | 2062 |
| 111 | GACGCTACCCTACCTT | 2−12−2 | 372 | GAcgctaccctaccTT | 333_1 | −22.5 | 2733 | 2711 |
| 112 | TGACGCTACCCTACCT | 2−12−2 | 373 | TGacgctaccctacCT | 334_1 | −22.9 | 2734 | 2712 |
| 113 | GACGCTACCCTACCT | 2−11−2 | 374 | GAcgctaccctacCT | 335_1 | −22.2 | 2734 | 2712 |
| 114 | TTGACGCTACCCTACC | 2−12−2 | 375 | TTgacgctaccctaCC | 336_1 | −22.5 | 2735 | 2713 |
| 115 | TTGACGCTACCCTAC | 2−9−4 | 376 | TTgacgctaccCTAC | 337_1 | −21.5 | 2736 | 2714 |
| 116 | CTTGACGCTACCCTAC | 2−12−2 | 377 | CTtgacgctaccctAC | 338_1 | −20.1 | 2736 | 2714 |
| 117 | CTTGACGCTACCCTA | 2−11−2 | 378 | CTtgacgctacccTA | 339_1 | −20.1 | 2737 | 2715 |
| 118 | CCTTCCACCAACTAAG | 2−12−2 | 379 | CCttccaccaactaAG | 340_1 | −20.6 | 2806 | 2784 |
| 119 | AATATTGATTTTATCCA | 4−9−4 | 380 | AATAttgattttaTCCA | 341_1 | −19.9 | 2866 | 2844 |
| 120 | CAATATTGATTTTATCC | 3−10−4 | 381 | CAAtattgattttATCC | 342_1 | −18 | 2867 | 2845 |
| 121 | CCAATATTGATTTTATCC | 2−13−3 | 382 | CCaatattgattttaTCC | 343_1 | −20.3 | 2867 | 2845 |
| 122 | TCTCTGACCCCAATATT | 2−13−2 | 383 | TCtctgaccccaataTT | 344_1 | −20.4 | 2877 | 2855 |
| 123 | CATTTGCATTTTTAAACT | 4−10−4 | 384 | CATTtgcatttttaAACT | 345_1 | −19.6 | 3005 | 2981 |
| 124 | CCATTTGCATTTTTAAAC | 4−12−2 | 385 | CCATttgcatttttaaAC | 346_1 | −19.9 | 3006 | 2982 |
| 125 | AACAACTCATGCACCC | 3−11−2 | 386 | AACaactcatgcacCC | 347_1 | −20 | 3723 | 3659 |
| 126 | CCCAGGAAACAACTCAT | 2−12−3 | 387 | CCcaggaaacaactCAT | 348_1 | −21.6 | 3729 | 3665 |
| 127 | CACCCAGGAAACAACTC | 3−12−2 | 388 | CACccaggaaacaacTC | 349_1 | −20.5 | 3731 | 3667 |
| 128 | CAAGTCCCACATACCAT | 2−13−2 | 389 | CAagtcccacataccAT | 350_1 | −20.9 | 4004 | 3945 |
| 129 | TATACCCCAAGTCCCAC | 2−13−2 | 390 | TAtaccccaagtcccAC | 351_1 | −22.9 | 4011 | 3952 |
| 130 | ACTCCTATACCCCAAG | 2−12−2 | 391 | ACtcctataccccaAG | 352_1 | −20.9 | 4017 | 3958 |
| 131 | CTAAACCAGTCATCCT | 3−11−2 | 392 | CTAaaccagtcatcCT | 353_1 | −20.4 | 4502 | 4453 |
| 132 | GCTAAACCAGTCATCC | 2−12−2 | 393 | GCtaaaccagtcatCC | 354_1 | −21.5 | 4503 | 4454 |
| 133 | CTGTTGATTACTTCAAA | 4−9−4 | 394 | CTGTtgattacttCAAA | 355_1 | −19.9 | 5514 | 6127 |
| 134 | TAGTCGATCACCATCA | 2−11−3 | 395 | AgtcgatcaccaTCA | 356_1 | −20.4 | 5606 | 6219 |
| 135 | TTAGTCGATCACCATC | 2−10−4 | 396 | TTagtcgatcacCATC | 357_1 | −20.2 | 5607 | 6220 |
| 136 | TAGTCGATCACCATC | 2−10−3 | 397 | TAgtcgatcaccATC | 358_1 | −18 | 5607 | 6220 |
| 137 | TTAGTCGATCACCAT | 3−8−4 | 398 | TTAgtcgatcaCCAT | 359_1 | −21.7 | 5608 | 6221 |
| 138 | CTACGTTCTTACCCTCT | 2−13−2 | 399 | CTacgttcttaccctCT | 360_1 | −22.9 | 5633 | 6246 |
| 139 | TACGTTCTTACCCTCT | 2−11−3 | 400 | TAcgttcttacccTCT | 361_1 | −21.9 | 5633 | 6246 |
| 140 | CACTACGTTCTTACCCTC | 2−14−2 | 401 | CActacgttcttacccTC | 362_1 | −23 | 5634 | 6247 |
| 141 | CTACGTTCTTACCCTC | 2−12−2 | 402 | CTacgttcttacccTC | 363_1 | −20.7 | 5634 | 6247 |
| 142 | ACTACGTTCTTACCCTC | 2−12−3 | 403 | ACtacgttcttaccCTC | 364_1 | −22.6 | 5634 | 6247 |
| 143 | CACTACGTTCTTACCCT | 2−13−2 | 404 | CActacgttcttaccCT | 365_1 | −22.1 | 5635 | 6248 |
| 144 | ACTACGTTCTTACCCT | 2−12−2 | 405 | ACtacgttcttaccCT | 366_1 | −20.1 | 5635 | 6248 |
| 145 | ACTACGTTCTTACCC | 3−10−2 | 406 | ACTacgttcttacCC | 367_1 | −20.6 | 5636 | 6249 |
| 146 | TCACTACGTTCTTACCC | 2−13−2 | 407 | TCactacgttcttacCC | 368_1 | −21.8 | 5636 | 6249 |
| 147 | CACTACGTTCTTACCC | 3−11−2 | 408 | CACtacgttcttacCC | 369_1 | −22.2 | 5636 | 6249 |
| 148 | TCACTACGTTCTTACC | 2−11−3 | 409 | TCactacgttcttACC | 370_1 | −19.6 | 5637 | 6250 |
| 149 | CACTACGTTCTTACC | 2−11−2 | 410 | CActacgttcttaCC | 371_1 | −18 | 5637 | 6250 |
| 150 | CTCACTACGTTCTTACC | 2−13−2 | 411 | CTcactacgttcttaCC | 372_1 | −21.2 | 5637 | 6250 |
| 151 | CACTCACTACGTTCTTAC | 3−13−2 | 412 | CACtcactacgttcttAC | 373_1 | −20.7 | 5638 | 6251 |
| 152 | ACTCACTACGTTCTTAC | 4−10−3 | 413 | ACTCactacgttctTAC | 374_1 | −21.7 | 5638 | 6251 |
| 153 | TCACTACGTTCTTAC | 3−9−3 | 414 | TCActacgttctTAC | 375_1 | −17.7 | 5638 | 6251 |
| 154 | CTCACTACGTTCTTAC | 3−10−3 | 415 | CTCactacgttctTAC | 376_1 | −19.6 | 5638 | 6251 |
| 155 | CCACTCACTACGTTCTTA | 2−14−2 | 416 | CCactcactacgttctTA | 377_1 | −22.6 | 5639 | 6252 |
| 156 | CTCACTACGTTCTTA | 4−7−4 | 417 | CTCActacgttCTTA | 378_1 | −21.8 | 5639 | 6252 |
| 157 | ACTCACTACGTTCTTA | 2−11−3 | 418 | ACtcactacgttcTTA | 379_1 | −18.1 | 5639 | 6252 |
| 158 | CACTCACTACGTTCTT | 2−10−4 | 419 | CActcactacgtTCTT | 380_1 | −20.4 | 5640 | 6253 |
| 159 | CCACTCACTACGTTCT | 2−11−3 | 420 | CCactcactacgtTCT | 381_1 | −22.2 | 5641 | 6254 |
| 160 | CCCACTCACTACGTTC | 2−12−2 | 421 | CCcactcactacgtTC | 382_1 | −21.8 | 5642 | 6255 |
| 161 | CCACTCACTACGTTC | 4−9−2 | 422 | CCACtcactacgtTC | 383_1 | −21.7 | 5642 | 6255 |
| 162 | CCCACTCACTACGTT | 2−11−2 | 423 | CCcactcactacgTT | 384_1 | −20.4 | 5643 | 6256 |
| 163 | AGTTAACATTTCTCTTTT | 3−11−4 | 424 | AGTtaacatttctcTTTT | 385_1 | −19.8 | 5883 | 6947 |
| 164 | AAGTTAACATTTCTCTTT | 4−10−4 | 425 | AAGTtaacatttctCTTT | 386_1 | −20.4 | 5884 | 6948 |
| 165 | CAACATACACTTCTCACT | 2−14−2 | 426 | CAacatacacttctcaCT | 387_1 | −19.2 | 5915 | 6979 |
| 166 | CACAACATACACTTCTCACT | 2−16−2 | 427 | CAcaacatacacttctcaCT | 388_1 | −21.9 | 5915 | 6979 |
| 167 | AACATACACTTCTCACT | 3−10−4 | 428 | AACatacacttctCACT | 389_1 | −20.2 | 5915 | 6979 |
| 168 | ACAACATACACTTCTCACT | 2−15−2 | 429 | ACaacatacacttctcaCT | 390_1 | −19.7 | 5915 | 6979 |
| 169 | CCACAACATACACTTCTCAC | 2−16−2 | 430 | CCacaacatacacttctcAC | 391_1 | −22.6 | 5916 | 6980 |
| 170 | CACAACATACACTTCTCAC | 2−15−2 | 431 | CAcaacatacacttctcAC | 392_1 | −19 | 5916 | 6980 |
| 171 | CACAACATACACTTCTCA | 3−13−2 | 432 | CACaacatacacttctCA | 393_1 | −20.1 | 5917 | 6981 |
| 172 | CCACAACATACACTTCTCA | 2−15−2 | 433 | CCacaacatacacttctCA | 394_1 | −22.7 | 5917 | 6981 |
| 173 | CACAACATACACTTCTC | 4−9−4 | 434 | CACAacatacactTCTC | 395_1 | −22.2 | 5918 | 6982 |
| 174 | CCACAACATACACTTCTC | 2−14−2 | 435 | CCacaacatacacttcTC | 396_1 | −20.6 | 5918 | 6982 |
| 175 | CCCACAACATACACTTCT | 2−14−2 | 436 | CCcacaacatacacttCT | 397_1 | −22.7 | 5919 | 6983 |
| 176 | ACCCACAACATACACTTCT | 2−15−2 | 437 | ACccacaacatacacttCT | 398_1 | −22.5 | 5919 | 6983 |
| 177 | CACCCACAACATACACTTC | 2−15−2 | 438 | CAcccacaacatacactTC | 399_1 | −22.1 | 5920 | 6984 |
| 178 | ACCCACAACATACACTTC | 2−14−2 | 439 | ACccacaacatacactTC | 400_1 | −20 | 5920 | 6984 |
| 179 | CCCACAACATACACTTC | 2−13−2 | 440 | CCcacaacatacactTC | 401_1 | −20.2 | 5920 | 6984 |
| 180 | CACCCACAACATACACTT | 3−13−2 | 441 | CACccacaacatacacTT | 402_1 | −21.8 | 5921 | 6985 |
| 181 | ACCCACAACATACACTT | 3−11−3 | 442 | ACCcacaacatacaCTT | 403_1 | −22.5 | 5921 | 6985 |
| 182 | CACCCACAACATACACT | 2−13−2 | 443 | CAcccacaacatacaCT | 404_1 | −20.5 | 5922 | 6986 |
| 183 | GGCACCCACAACATACA | 2−13−2 | 444 | GGcacccacaacataCA | 405_1 | −22.8 | 5924 | 6988 |
| 184 | CTCCATACCACAACTG | 3−10−3 | 445 | CTCcataccacaaCTG | 406_1 | −22.1 | 6012 | 7076 |
| 185 | CCTCCATACCACAACT | 2−12−2 | 446 | CCtccataccacaaCT | 407_1 | −22.2 | 6013 | 7077 |
| 186 | ACCCTCCATACCACAAC | 2−13−2 | 447 | ACcctccataccacaAC | 408_1 | −22 | 6014 | 7078 |
| 187 | CCCTCCATACCACAAC | 2−12−2 | 448 | CCctccataccacaAC | 409_1 | −22.2 | 6014 | 7078 |
| 188 | CACCCTCCATACCACAA | 2−13−2 | 449 | CAccctccataccacAA | 410_1 | −22.3 | 6015 | 7079 |
| 189 | CAAACCTAGAACCACCA | 2−13−2 | 450 | CAaacctagaaccacCA | 411_1 | −19.8 | 6105 | 7170 |
| 190 | CAAACCTAGAACCACC | 4−10−2 | 451 | CAAAcctagaaccaCC | 412_1 | −20 | 6106 | 7171 |
| 191 | TCAAACCTAGAACCACC | 3−11−3 | 452 | TCAaacctagaaccACC | 413_1 | −21.9 | 6106 | 7171 |
| 192 | ATCAAACCTAGAACCAC | 3−10−4 | 453 | ATCaaacctagaaCCAC | 414_1 | −21.7 | 6107 | 7172 |
| 193 | CATCAAACCTAGAACCAC | 2−13−3 | 454 | CAtcaaacctagaacCAC | 415_1 | −20 | 6107 | 7172 |
| 194 | TCAAACCTAGAACCAC | 3−10−3 | 455 | TCAaacctagaacCAC | 416_1 | −18.7 | 6107 | 7172 |
| 195 | CATCAAACCTAGAACC | 3−9−4 | 456 | CATcaaacctagAACC | 417_1 | −19.9 | 6109 | 7174 |
| 196 | ICCATCAAACCTAGAAC | 3−10−3 | 457 | CCAtcaaacctagAAC | 418_1 | −18.6 | 6110 | 7175 |
| 197 | AGCATCCATCAAACCTA | 2−12−3 | 458 | AGcatccatcaaacCTA | 419_1 | −21.9 | 6114 | 7179 |
| 198 | GCATCCATCAAACCTA | 2−11−3 | 459 | GCatccatcaaacCTA | 420_1 | −21.6 | 6114 | 7179 |
| 199 | CAGCATCCATCAAACCT | 2−13−2 | 460 | CAgcatccatcaaacCT | 421_1 | −21.5 | 6115 | 7180 |
| 200 | TCAGCATCCATCAAACC | 2−13−2 | 461 | TCagcatccatcaaaCC | 422_1 | −20.9 | 6116 | 7181 |
| 201 | CAGCAAACTTGCAACA | 3−9−4 | 462 | CAGcaaacttgcAACA | 423_1 | −19.9 | 6308 | 7373 |
| 202 | TCTACAGGTTCCACTC | 2−12−2 | 463 | TCtacaggttccacTC | 424_1 | −19.7 | 6542 | 7616 |
| 203 | AACACTCGAACACGA | 4−7−4 | 464 | AACActcgaacACGA | 425_1 | −18.8 | 6956 | 8030 |
| 204 | CCCCTACGGTCTCAC | 2−11−2 | 465 | CCcctacggtctcAC | 426_1 | −22.6 | 7074 | 8148 |
| 205 | TCCCCTACGGTCTCAC | 2−12−2 | 466 | TCccctacggtctcAC | 427_1 | −22.9 | 7074 | 8148 |
| 206 | TCACATGGACACTCACC | 2−13−2 | 467 | TCacatggacactcaCC | 428_1 | −21.4 | 7201 | 8275 |
| 207 | ATTGTAAGTTTATCCA | 4−9−3 | 468 | ATTGtaagtttatCCA | 429_1 | −20 | 7506 | 8580 |
| 208 | CAATTGAGTCACAATA | 4−8−4 | 469 | CAATtgagtcacAATA | 430_1 | −17 | 7526 | 8600 |
| 209 | CTCAATATAAGTAAACAA | 4−10−4 | 470 | CTCAatataagtaaACAA | 431_1 | −16.9 | 7539 | 8627 |
| 210 | GCCTCTGTCTCAATATA | 2−13−2 | 471 | GCctctgtctcaataTA | 432_1 | −21.2 | 7548 | 8636 |
| 211 | AGACTAGTAATTCCAAA | 4−9−4 | 472 | AGACtagtaattcCAAA | 433_1 | −19.7 | 7648 | 8711 |
| 212 | TTCTCTACCATGTACAA | 3−11−3 | 473 | TTCtctaccatgtaCAA | 434_1 | −19.9 | 7758 | 8821 |
| 213 | CTTAACCCAGAACCTTT | 2−12−3 | 474 | CTtaacccagaaccTTT | 435_1 | −20.2 | 8436 | 9514 |
| 214 | CCTTAACCCAGAACCTT | 2−13−2 | 475 | CCttaacccagaaccTT | 436_1 | −22.3 | 8437 | 9515 |
| 215 | TTCCCTTAACCCAGAAC | 3−12−2 | 476 | TTCccttaacccagaAC | 437_1 | −21.4 | 8440 | 9518 |
| 216 | CAAGGTTCCTACTCTC | 3−11−2 | 477 | CAAggttcctactcTC | 438_1 | −20 | 8564 | 9642 |
| 217 | CCAAACTCAGAATCTTCA | 2−14−2 | 478 | CCaaactcagaatcttCA | 439_1 | −19.7 | 8794 | 9872 |
| 218 | TGCTGACATCCTACAC | 2−11−3 | 479 | TGctgacatcctaCAC | 440_1 | −20.5 | 8955 | 10033 |
| 219 | CTGCTGACATCCTACAC | 2−13−2 | 480 | CTgctgacatcctacAC | 441_1 | −20.6 | 8955 | 10033 |
| 220 | CACGGCTTCCTTACCAC | 2−13−2 | 481 | CAcggcttccttaccAC | 442_1 | −22.9 | 9141 | 10221 |
| 221 | CACGGCTTCCTTACCA | 2−12−2 | 482 | CAcggcttccttacCA | 443_1 | −22.9 | 9142 | 10222 |
| 222 | CAACACAACTTTGTCCT | 3−12−2 | 483 | CAAcacaactttgtcCT | 444_1 | −19.5 | 9631 | 10711 |
| 223 | AATACCCCAGCAACCC | 2−12−2 | 484 | AAtaccccagcaacCC | 445_1 | −22.4 | 10098 | 11182 |
| 224 | CAATACCCCAGCAACC | 2−12−2 | 485 | CAataccccagcaaCC | 446_1 | −22.3 | 10099 | 11183 |
| 225 | CCAATACCCCAGCAAC | 2−12−2 | 486 | CCaataccccagcaAC | 447_1 | −21.7 | 10100 | 11184 |
| 226 | CCCAATACCCCAGCAA | 2−12−2 | 487 | CCcaataccccagcAA | 448_1 | −22.9 | 10101 | 11185 |
| 227 | AACAATGAAATATATTCAT | 4−11−4 | 488 | AACAatgaaatatatTCAT | 449_1 | −16.8 | 10342 | 11425 |
| 228 | ACAATGAAATATATTCAT | 4−10−4 | 489 | ACAAtgaaatatatTCAT | 450_1 | −16.6 | 10342 | 11425 |
| 229 | GATATTACAATTCATAACTA | 3−13−4 | 490 | GATattacaattcataACTA | 451_1 | −20.2 | 10382 | 11465 |
| 230 | CAGATATTACAATTCATAACT | 3−16−2 | 491 | CAGatattacaattcataaCT | 452_1 | −19.6 | 10383 | 11466 |
| 231 | GATATTACAATTCATAACT | 3−13−3 | 492 | GATattacaattcataACT | 453_1 | −18 | 10383 | 11466 |
| 232 | AGATATTACAATTCATAACT | 4−12−4 | 493 | AGATattacaattcatAACT | 454_1 | −20.9 | 10383 | 11466 |
| 233 | GTCAGATATTACAATTCA | 3−11−4 | 494 | GTCagatattacaaTTCA | 455_1 | −20 | 10388 | 11471 |
| 234 | AATCTCCAGAACAACTA | 4−10−3 | 495 | AATCtccagaacaaCTA | 456_1 | −20 | 10462 | 11545 |
| 235 | CAATCTCCAGAACAACT | 2−11−4 | 496 | CAatctccagaacAACT | 457_1 | −18.8 | 10463 | 11546 |
| 236 | TCAATCTCCAGAACAAC | 4−9−4 | 497 | TCAAtctccagaaCAAC | 458_1 | −20.4 | 10464 | 11547 |
| 237 | TACAGTGTCAATCTCCA | 2−13−2 | 498 | TAcagtgtcaatctcCA | 459_1 | −19.8 | 10471 | 11554 |
| 238 | CTACAGTGTCAATCTC | 3−10−3 | 499 | CTAcagtgtcaatCTC | 460_1 | −20 | 10473 | 11556 |
| 239 | TAGTAGCCCCACACAC | 2−12−2 | 500 | TAgtagccccacacAC | 461_1 | −21.5 | 10517 | 11588 |
| 240 | CCCCTGTACACTTTAC | 2−12−2 | 501 | CCcctgtacactttAC | 462_1 | −20.9 | 10763 | 11879 |
| 241 | CTACCAAGACATCTAT | 2−10−4 | 502 | CTaccaagacatCTAT | 463_1 | −19.7 | 11188 | 12300 |
| 242 | GCTACCAAGACATCTA | 2−12−2 | 503 | GCtaccaagacatcTA | 464_1 | −19.3 | 11189 | 12301 |
| 243 | TGACCTTCACTTCTATC | 4−11−2 | 504 | TGACcttcacttctaTC | 465_1 | −21.9 | 11658 | 12770 |
| 244 | CACTCACCAGATACACACA | 2−15−2 | 505 | CActcaccagatacacaCA | 466_1 | −22.7 | 11951 | 13063 |
| 245 | ACTCACCAGATACACACA | 2−14−2 | 506 | ACtcaccagatacacaCA | 467_1 | −20.8 | 11951 | 13063 |
| 246 | TCTCTTTACTCACCGA | 2−11−3 | 507 | TCtctttactcacCGA | 468_1 | −21 | 12349 | 13461 |
| 247 | GAAACTTCTCTTTACTCACC | 2−16−2 | 508 | GAaacttctctttactcaCC | 469_1 | −22.8 | 12351 | 13463 |
| 248 | ACTTCTCTTTACTCACC | 3−12−2 | 509 | ACTtctctttactcaCC | 470_1 | −21.8 | 12351 | 13463 |
| 249 | AAACTTCTCTTTACTCACC | 2−15−2 | 510 | AAacttctctttactcaCC | 471_1 | −20.1 | 12351 | 13463 |
| 250 | AACTTCTCTTTACTCACC | 2−14−2 | 511 | AActtctctttactcaCC | 472_1 | −20 | 12351 | 13463 |
| 251 | GAAACTTCTCTTTACTCAC | 3−12−4 | 512 | GAAacttctctttacTCAC | 473_1 | −22 | 12352 | 13464 |
| 252 | AACTTCTCTTTACTCAC | 4−9−4 | 513 | AACTtctctttacTCAC | 474_1 | −21.2 | 12352 | 13464 |
| 253 | AAACTTCTCTTTACTCAC | 3−11−4 | 514 | AAActtctctttacTCAC | 475_1 | −19.4 | 12352 | 13464 |
| 254 | TGAAACTTCTCTTTACTCAC | 2−16−2 | 515 | TGaaacttctctttactcAC | 476_1 | −18.9 | 12352 | 13464 |
| 255 | AAACTTCTCTTTACTCA | 4−9−4 | 516 | AAACttctctttaCTCA | 477_1 | −20.4 | 12353 | 13465 |
| 256 | GAAACTTCTCTTTACTCA | 2−14−2 | 517 | GAaacttctctttactCA | 478_1 | −18.2 | 12353 | 13465 |
| 257 | TGAAACTTCTCTTTACTCA | 3−13−3 | 518 | TGAaacttctctttacTCA | 479_1 | −21.9 | 12353 | 13465 |
| 258 | GAAACTTCTCTTTACTC | 4−10−3 | 519 | GAAActtctctttaCTC | 480_1 | −18.9 | 12354 | 13466 |
| 259 | TGAAACTTCTCTTTACTC | 3−12−3 | 520 | TGAaacttctctttaCTC | 481_1 | −20.3 | 12354 | 13466 |
| 260 | TGAAACTTCTCTTTACT | 3−12−2 | 521 | TGAaacttctctttaCT | 482_1 | −17.8 | 12355 | 13467 |
| 261 | GTGAAACTTCTCTTTACT | 3−13−2 | 522 | GTGaaacttctctttaCT | 483_1 | −19.8 | 12355 | 13467 |
| 262 | TACAGACTCAAAAACCCA | 3−12−3 | 523 | TACagactcaaaaacCCA | 484_1 | −21.8 | 12385 | 13497 |
| 263 | ACAGACTCAAAAACCCA | 3−12−2 | 524 | ACAgactcaaaaaccCA | 485_1 | −19.2 | 12385 | 13497 |
| 264 | ATACAGACTCAAAAACCCA | 3−14−2 | 525 | ATAcagactcaaaaaccCA | 486_1 | −20.5 | 12385 | 13497 |
| 265 | CATACAGACTCAAAAACCC | 2−14−3 | 526 | CAtacagactcaaaaaCCC | 487_1 | −22.2 | 12386 | 13498 |
| 266 | ATACAGACTCAAAAACCC | 3−13−2 | 527 | ATAcagactcaaaaacCC | 488_1 | −19.4 | 12386 | 13498 |
| 267 | TACAGACTCAAAAACCC | 2−12−3 | 528 | TAcagactcaaaaaCCC | 489_1 | −19.8 | 12386 | 13498 |
| 268 | CATACAGACTCAAAAACC | 2−12−4 | 529 | CAtacagactcaaaAACC | 490_1 | −18.4 | 12387 | 13499 |
| 269 | ATACAGACTCAAAAACC | 4−9−4 | 530 | ATACagactcaaaAACC | 491_1 | −19.1 | 12387 | 13499 |
| 270 | TCATACAGACTCAAAAAC | 4−10−4 | 531 | TCATacagactcaaAAAC | 492_1 | −17.9 | 12388 | 13500 |
| 271 | ATCATACAGACTCAAAAAC | 4−11−4 | 532 | ATCAtacagactcaaAAAC | 493_1 | −18.3 | 12388 | 13500 |
| 272 | ACCCTTATCATACAGA | 3−11−2 | 533 | ACCcttatcatacaGA | 494_1 | −20.5 | 12397 | 13509 |
| 273 | TGACCCTTATCATACA | 2−12−2 | 534 | TGacccttatcataCA | 495_1 | −18.3 | 12399 | 13511 |
| 274 | ACTAGACTCTAAAATCT | 4−9−4 | 535 | ACTAgactctaaaATCT | 496_1 | −20.1 | 12725 | 13837 |
| 275 | CCACTAGACTCTAAAATCT | 2−15−2 | 536 | CCactagactctaaaatCT | 497_1 | −20.1 | 12725 | 13837 |
| 276 | CACTAGACTCTAAAATCT | 3−13−2 | 537 | CACtagactctaaaatCT | 498_1 | −17.9 | 12725 | 13837 |
| 277 | CACTAGACTCTAAAATC | 4−9−4 | 538 | CACTagactctaaAATC | 499_1 | −18.8 | 12726 | 13838 |
| 278 | CCACTAGACTCTAAAATC | 2−14−2 | 539 | CCactagactctaaaaTC | 500_1 | −17.7 | 12726 | 13838 |
| 279 | CCACTAGACTCTAAAAT | 4−9−4 | 540 | CCACtagactctaAAAT | 501_1 | −20.4 | 12727 | 13839 |
| 280 | CACTGGCATACATCTCC | 2−13−2 | 541 | CActggcatacatctCC | 502_1 | −22.5 | 13154 | 14283 |
| 281 | ACTGGCATACATCTCC | 2−12−2 | 542 | ACtggcatacatctCC | 503_1 | −20.6 | 13154 | 14283 |
| 282 | AGGCGAACCTCATCC | 2−11−2 | 543 | AGgcgaacctcatCC | 504_1 | −21.8 | 13316 | 14445 |
| 283 | ACTGACCATACTCCACT | 2−13−2 | 544 | ACtgaccatactccaCT | 505_1 | −21.4 | 13344 | 14473 |
| 284 | GACTGACCATACTCCAC | 2−13−2 | 545 | GActgaccatactccAC | 506_1 | −20.4 | 13345 | 14474 |
| 285 | GACTGACCATACTCCA | 3−11−2 | 546 | GACtgaccatactcCA | 507_1 | −21.7 | 13346 | 14475 |
| 286 | AACCTTAACCGTGAA | 4−7−4 | 547 | AACCttaaccgTGAA | 508_1 | −20.8 | 13491 | 14620 |
| 287 | CGAAGAACCTTAACC | 4−7−4 | 548 | CGAAgaaccttAACC | 509_1 | −19.6 | 13496 | 14625 |
| 288 | TCGAAGAACCTTAACC | 2−10−4 | 549 | TCgaagaaccttAACC | 510_1 | −18.1 | 13496 | 14625 |
| 289 | TCGAAGAACCTTAAC | 4−7−4 | 550 | TCGAagaacctTAAC | 511_1 | −17.6 | 13497 | 14626 |
| 290 | TTCTCGAAGAACCTTA | 3−9−4 | 551 | TTCtcgaagaacCTTA | 512_1 | −19.7 | 13499 | 14628 |
| 291 | AGATTTCCCATTTCCAA | 3−12−2 | 552 | AGAtttcccatttccAA | 513_1 | −20.8 | 13643 | 14772 |
| 292 | GAGATTTCCCATTTCCAA | 2−14−2 | 553 | GAgatttcccatttccAA | 514_1 | −21.1 | 13643 | 14772 |
| 293 | GAGATTTCCCATTTCCA | 2−13−2 | 554 | GAgatttcccatttcCA | 515_1 | −22.3 | 13644 | 14773 |
| 294 | ACTTGTTGCTCACTAT | 2−11−3 | 555 | ACttgttgctcacTAT | 516_1 | −19.2 | 13732 | 14861 |
| 295 | CCATCCCCATGATCAA | 3−11−2 | 556 | CCAtccccatgatcAA | 517_1 | −22.7 | 13946 | 15075 |
| 296 | CTTTTCTTTTATTTACCCT | 3−14−2 | 557 | CTTttcttttatttaccCT | 518_1 | −22.2 | 14340 | 15469 |
| 297 | TTTTCTTTTATTTACCCT | 3−13−2 | 558 | TTTtcttttatttaccCT | 519_1 | −19.5 | 14340 | 15469 |
| 298 | GCTTTTCTTTTATTTACCC | 2−15−2 | 559 | GCttttcttttatttacCC | 520_1 | −24 | 14341 | 15470 |
| 299 | CTTTTCTTTTATTTACCC | 2−14−2 | 560 | CTtttcttttatttacCC | 521_1 | −20.2 | 14341 | 15470 |
| 300 | AAGCTTTTCTTTTATTTACC | 2−16−2 | 561 | AAgcttttcttttatttaCC | 522_1 | −20.4 | 14342 | 15471 |
| 301 | GCTTTTCTTTTATTTACC | 2−14−2 | 562 | GCttttcttttatttaCC | 523_1 | −21.2 | 14342 | 15471 |
| 302 | AGCTTTTCTTTTATTTACC | 2−14−3 | 563 | AGcttttcttttatttACC | 524_1 | −21.7 | 14342 | 15471 |

[0285] In the table, capital letters are beta-D-oxy LNA nucleosides, lowercase letters are DNA nucleosides, all LNA C are 5-methyl cytosine, and all internucleoside linkages are phosphorothioate internucleoside linkages.

[0286] The relative mouse C4b and mouse C4a mRNA expression level in Table 8 is shown as percent of control (PBS-treated cells). The values in the columns designated with underlined C4b are based on detection of C4b transcripts only. The values in the columns designated with underlined C4a and C4b are based on detection of C4a and C4b transcripts.

TABLE 8

| | | | C4 |
|---|---|---|---|
| | | C4 | mRNA |
| | | mRNA | qPCR SP |
| | | qPCR SP | probe1 |
| | | probe1 | mouse |
| | | mouse | hepato- |
| | | hepato- | cytes |
| CMP | | cytes | C4a |
| ID | | C4b: | and C4b: |
| NO | Conc | AP015278 | AP015277 |
| 264_1 | 0.3 | 33.2 | 24.4 |
| 265_1 | 0.06 | 89.1 | 78.6 |
| 265_1 | 0.3 | 45.6 | 39.5 |
| 266_1 | 0.06 | 109 | 96 |
| 266_1 | 0.3 | 52.8 | 50.4 |
| 267_1 | 0.06 | 85 | 73 |
| 267_1 | 0.3 | 44.8 | 38.6 |
| 268_1 | 0.06 | 82 | 83.7 |
| 268_1 | 0.3 | 42.1 | 34.5 |
| 269_1 | 0.06 | 96.6 | 92.6 |
| 269_1 | 0.3 | 53.1 | 47.1 |
| 270_1 | 0.06 | 107 | 91.9 |
| 270_1 | 0.3 | 44.7 | 34.8 |
| 271_1 | 0.06 | 83.1 | 72.9 |
| 271_1 | 0.3 | 55.9 | 46.2 |
| 272_1 | 0.06 | 104 | 106 |
| 272_1 | 0.3 | 63 | 54.7 |
| 273_1 | 0.06 | 90 | 71.7 |
| 273_1 | 0.3 | 43.7 | 35.9 |
| 274_1 | 0.06 | 68.1 | 52.3 |
| 274_1 | 0.3 | 44.1 | 37.1 |
| 275_1 | 0.06 | 118 | 107 |
| 275_1 | 0.3 | 48.3 | 36 |
| 276_1 | 0.06 | 104 | 102 |
| 276_1 | 0.3 | 50 | 44.8 |
| 277_1 | 0.06 | 73.7 | 59.2 |
| 277_1 | 0.3 | 40.9 | 33.6 |
| 278_1 | 0.06 | 104 | 92.4 |
| 278_1 | 0.3 | 33.7 | 29.3 |
| 279_1 | 0.06 | 78.8 | 75.4 |
| 279_1 | 0.3 | 41.3 | 34.8 |
| 280_1 | 0.06 | 48.6 | 39.3 |
| 280_1 | 0.3 | 47.5 | 45.8 |
| 281_1 | 0.06 | 73.2 | 70.7 |
| 281_1 | 0.3 | 36.4 | 31.7 |
| 282_1 | 0.06 | 59.4 | 42.4 |
| 282_1 | 0.3 | 60.5 | 52.8 |
| 283_1 | 0.06 | 164 | 183 |
| 283_1 | 0.3 | 75.9 | 64.3 |
| 284_1 | 0.06 | 118 | 120 |
| 284_1 | 0.3 | 81.4 | 69.3 |
| 285_1 | 0.06 | 63 | 49.6 |
| 285_1 | 0.3 | 72.4 | 65 |
| 286_1 | 0.06 | 40.9 | 35.1 |
| 286_1 | 0.3 | 20.9 | 17.3 |
| 287_1 | 0.06 | 80 | 63.4 |
| 287_1 | 0.3 | 52.2 | 43.9 |
| 288_1 | 0.06 | 83.9 | 73.2 |
| 288_1 | 0.3 | 44 | 43.5 |
| 289_1 | 0.06 | 99.9 | 93.3 |
| 289_1 | 0.3 | 52.5 | 51.5 |
| 290_1 | 0.06 | 129 | 132 |
| 290_1 | 0.3 | 108 | 104 |
| 291_1 | 0.06 | 83 | 72.7 |
| 291_1 | 0.3 | 84.9 | 86.3 |
| 292_1 | 0.06 | 124 | 119 |
| 292_1 | 0.3 | 98.1 | 93.3 |
| 293_1 | 0.06 | 161 | 170 |
| 293_1 | 0.3 | 74.2 | 68.2 |
| 294_1 | 0.06 | 113 | 117 |
| 294_1 | 0.3 | 126 | 129 |
| 295_1 | 0.06 | 74.5 | 67.9 |
| 295_1 | 0.3 | 105 | 102 |
| 296_1 | 0.06 | 96.9 | 91.4 |
| 296_1 | 0.3 | 71.7 | 72.3 |
| 297_1 | 0.06 | 129 | 122 |
| 297_1 | 0.3 | 84.8 | 81.8 |
| 298_1 | 0.06 | 170 | 177 |
| 298_1 | 0.3 | 103 | 108 |
| 299_1 | 0.06 | 61.8 | 54.2 |
| 299_1 | 0.3 | 41.9 | 38.2 |
| 300_1 | 0.06 | 95.6 | 81.9 |
| 300_1 | 0.3 | 64.5 | 57 |
| 301_1 | 0.06 | 79.7 | 59.5 |
| 301_1 | 0.3 | 25.1 | 16.9 |
| 302_1 | 0.06 | 172 | 136 |
| 302_1 | 0.3 | 102 | 104 |
| 303_1 | 0.06 | 169.5 | 56 |
| 303_1 | 0.3 | 23.6 | 22.9 |
| 304_1 | 0.06 | 86.2 | 79 |
| 304_1 | 0.3 | 80.1 | 84.7 |
| 305_1 | 0.06 | 121 | 112 |
| 305_1 | 0.3 | 84.1 | 77.5 |
| 306_1 | 0.06 | 85 | 83.3 |
| 306_1 | 0.3 | 76.5 | 75.2 |
| 307_1 | 0.06 | 85.3 | 75.7 |
| 307_1 | 0.3 | 42.5 | 35.8 |
| 308_1 | 0.06 | 80.1 | 66.8 |
| 308_1 | 0.3 | 63.2 | 51.6 |
| 309_1 | 0.06 | 105 | 87 |
| 309_1 | 0.3 | 71.2 | 56.6 |
| 310_1 | 0.06 | 93.1 | 90.9 |
| 310_1 | 0.3 | 75.2 | 72.2 |
| 311_1 | 0.06 | 73.9 | 64.9 |
| 311_1 | 0.3 | 108 | 111 |
| 312_1 | 0.06 | 108 | 93 |
| 312_1 | 0.3 | 73.9 | 78.4 |
| 313_1 | 0.06 | 114 | 107 |
| 313_1 | 0.3 | 88.9 | 78 |
| 314_1 | 0.06 | 118 | 115 |
| 314_1 | 0.3 | 83.4 | 76.9 |
| 315_1 | 0.06 | 128 | 120 |
| 315_1 | 0.3 | 87.8 | 92.1 |
| 316_1 | 0.06 | 117 | 128 |
| 316_1 | 0.3 | 115 | 132 |
| 317_1 | 0.06 | 81.9 | 77 |
| 317_1 | 0.3 | 116 | 115 |
| 318_1 | 0.06 | 108 | 93.2 |
| 318_1 | 0.3 | 108 | 96.6 |
| 319_1 | 0.06 | 127 | 124 |
| 319_1 | 0.3 | 71.8 | 68.4 |
| 320_1 | 0.06 | 55.5 | 50.1 |
| 320_1 | 0.3 | 81.5 | 86.6 |
| 321_1 | 0.06 | 131 | 123 |
| 321_1 | 0.3 | 93.8 | 89.3 |
| 322_1 | 0.06 | 92.8 | 90.8 |
| 322_1 | 0.3 | 75.5 | 82.5 |
| 323_1 | 0.06 | 60.7 | 56.5 |
| 323_1 | 0.3 | 76.9 | 71.5 |
| 324_1 | 0.06 | 89.4 | 75.8 |
| 324_1 | 0.3 | 67.2 | 63.5 |
| 325_1 | 0.06 | 75.7 | 66.8 |
| 325_1 | 0.3 | 64.4 | 53.6 |
| 326_1 | 0.06 | 90.4 | 85.1 |
| 326_1 | 0.3 | 83 | 79.4 |
| 327_1 | 0.06 | 84 | 76.3 |
| 327_1 | 0.3 | 92.8 | 99.5 |
| 328_1 | 0.06 | 77.3 | 76.4 |
| 328_1 | 0.3 | 61.6 | 67.3 |
| 329_1 | 0.06 | 136 | 137 |
| 329_1 | 0.3 | 106 | 90.2 |
| 330_1 | 0.06 | 196 | 193 |
| 330_1 | 0.3 | 111 | 115 |
| 331_1 | 0.06 | 108 | 112 |
| 331_1 | 0.3 | 86.9 | 82.1 |
| 332_1 | 0.06 | 123 | 126 |
| 332_1 | 0.3 | 126 | 135 |
| 333_1 | 0.06 | 108 | 106 |
| 333_1 | 0.3 | 91.5 | 91.2 |
| 334_1 | 0.06 | 138 | 137 |
| 334_1 | 0.3 | 83.5 | 187.7 |
| 335_1 | 0.06 | 96.5 | 87.7 |
| 335_1 | 0.3 | 90.5 | 75 |
| 336_1 | 0.06 | 153 | 144 |
| 336_1 | 0.3 | 103 | 86.6 |
| 337_1 | 0.06 | 71.8 | 62.8 |
| 337_1 | 0.3 | 77.9 | 66.3 |
| 338_1 | 0.06 | 81.4 | 68.4 |
| 338_1 | 0.3 | 117 | 110 |
| 339_1 | 0.06 | 73.5 | 54.9 |
| 339_1 | 0.3 | 133 | 124 |
| 340_1 | 0.06 | 53.2 | 44.4 |
| 340_1 | 0.3 | 27 | 22 |
| 341_1 | 0.06 | 116 | 115 |
| 341_1 | 0.3 | 72.5 | 65.9 |
| 342_1 | 0.06 | \|63.4 | 57.7 |
| 342_1 | 0.3 | 90.9 | 92.1 |
| 343_1 | 0.06 | \|62.6 | 67 |
| 343_1 | 0.3 | 57.9 | 58.9 |
| 344_1 | 0.06 | 104 | 99.5 |
| 344_1 | 0.3 | 65.2 | 56 |
| 345_1 | 0.06 | 112 | 123 |
| 345_1 | 0.3 | 79.8 | 77.9 |
| 346_1 | 0.06 | 64.2 | 62.5 |
| 346_1 | 0.3 | 26 | 20.8 |
| 347_1 | 0.06 | 82.8 | 84.2 |
| 347_1 | 0.3 | 53.3 | 53.8 |
| 348_1 | 0.06 | 124 | 134 |
| 348_1 | 0.3 | 71.5 | 71.3 |
| 349_1 | 0.06 | 102 | 104 |
| 349_1 | 0.3 | 89.8 | 90.3 |
| 350_1 | 0.06 | 122 | 103 |
| 350_1 | 0.3 | 79.3 | 70.3 |
| 351_1 | 0.06 | 137 | 136 |
| 351_1 | 0.3 | 129 | 130 |
| 352_1 | 0.06 | 106 | 91.7 |
| 352_1 | 0.3 | 90.6 | 79 |
| 353_1 | 0.06 | 102 | 97.2 |
| 353_1 | 0.3 | 83.3 | 83.2 |
| 354_1 | 0.06 | 85.6 | 73.4 |
| 354_1 | 0.3 | 97.8 | 90.8 |
| 355_1 | 0.06 | 62.8 | 55.3 |
| 355_1 | 0.3 | 18 | 15.1 |
| 356_1 | 0.06 | 123 | 113 |
| 356_1 | 0.3 | 124 | 122 |
| 357_1 | 0.06 | 89.7 | 76 |
| 357_1 | 0.3 | 72.1 | 63 |
| 358_1 | 0.06 | 78.4 | 64.9 |
| 358_1 | 0.3 | 73.5 | 75.7 |
| 359_1 | 0.06 | 105 | 103 |
| 359_1 | 0.3 | 86.2 | 82.1 |
| 360_1 | 0.06 | 121 | 114 |
| 360_1 | 0.3 | 105 | 97.3 |
| 361_1 | 0.06 | 98.5 | 101 |
| 361_1 | 0.3 | 73.4 | 67.2 |
| 362_1 | 0.06 | 152 | 145 |
| 362_1 | 0.3 | 136 | 132 |
| 363_1 | 0.06 | 121 | 129 |
| 363_1 | 0.3 | 90.2 | 88.1 |
| 364_1 | 0.06 | 105 | 122 |
| 364_1 | 0.3 | 123 | 122 |
| 365_1 | 0.06 | 88.2 | 96.4 |
| 365_1 | 0.3 | 62.1 | 54.9 |
| 366_1 | 0.06 | 99 | 89 |
| 366_1 | 0.3 | 72.5 | 72.7 |
| 367_1 | 0.06 | 94.9 | 94.5 |
| 367_1 | 0.3 | 102 | 106 |
| 368_1 | 0.06 | 102 | 92.1 |
| 368_1 | 0.3 | 128 | 107 |
| 369_1 | 0.06 | 121 | 140 |
| 369_1 | 0.3 | 94.1 | 105 |
| 370_1 | 0.06 | 85.5 | 77.2 |
| 370_1 | 0.3 | 154 | 176 |
| 371_1 | 0.06 | 118 | 102 |
| 371_1 | 0.3 | 115 | 101 |
| 372_1 | 0.06 | 94.9 | 93.3 |
| 372_1 | 0.3 | 62.6 | 58.4 |
| 373_1 | 0.06 | 118 | 108 |
| 373_1 | 0.3 | 95.1 | 98 |
| 374_1 | 0.06 | 97.1 | 106 |
| 374_1 | 0.3 | 99.4 | 102 |
| 375_1 | 0.06 | 91.4 | 86.9 |
| 375_1 | 0.3 | 73.5 | 69.7 |
| 376_1 | 0.06 | 126 | 109 |
| 376_1 | 0.3 | 97.9 | 93.4 |
| 377_1 | 0.06 | 89.1 | 77.2 |
| 377_1 | 0.3 | 77.2 | 66.7 |
| 378_1 | 0.06 | 76.1 | 64.2 |
| 378_1 | 0.3 | 82.1 | 68.2 |
| 379_1 | 0.06 | 89.6 | 81.4 |
| 379_1 | 0.3 | 75.4 | 74.5 |
| 380_1 | 0.06 | 115 | 116 |
| 380_1 | 0.3 | 90.5 | 99 |
| 381_1 | 0.06 | 121 | 107 |
| 381_1 | 0.3 | 86.6 | 94.2 |
| 382_1 | 0.06 | 95.5 | 96.9 |
| 382_1 | 0.3 | 84.3 | 91.5 |
| 383_1 | 0.06 | 95.5 | 97.9 |
| 383_1 | 0.3 | 70.6 | 69.1 |
| 384_1 | 0.06 | 142 | 145 |
| 384_1 | 0.3 | 212 | 220 |
| 385_1 | 0.06 | \|73.3 | 67.1 |
| 385_1 | 0.3 | 69.7 | 70.6 |
| 386_1 | 0.06 | 109 | 107 |
| 386_1 | 0.3 | 137 | 136 |
| 387_1 | 0.06 | 90 | 77.1 |
| 387_1 | 0.3 | 70.5 | 69.5 |
| 388_1 | 0.06 | 152 | 153 |
| 388_1 | 0.3 | 116 | 124 |
| 389_1 | 0.06 | 130 | 130 |
| 389_1 | 0.3 | 103 | 102 |
| 390_1 | 0.06 | 85.8 | 128 |
| 390_1 | 0.3 | 83.8 | 85.2 |
| 391_1 | 0.06 | 58.9 | 55.1 |
| 391_1 | 0.3 | 163.4 | 54.9 |
| 392_1 | 0.06 | 114 | 95.2 |
| 392_1 | 0.3 | 100 | 81.2 |
| 393_1 | 0.06 | 121 | 119 |
| 393_1 | 0.3 | 87.5 | 75.6 |
| 394_1 | 0.06 | 108 | 108 |
| 394_1 | 0.3 | \|59.8 | 58 |
| 395_1 | 0.3 | 87.4 | 87.7 |
| 396_1 | 0.06 | 83.7 | 75.5 |
| 396_1 | 0.3 | 80.2 | 70 |
| 397_1 | 0.06 | 195.7 | 94.4 |
| 397_1 | 0.3 | 78.3 | 71.8 |
| 398_1 | 0.06 | 101 | 87.2 |
| 398_1 | 0.3 | 91.2 | 82.9 |
| 399_1 | 0.06 | 105 | 88.7 |
| 399_1 | 0.3 | 109 | 99.7 |
| 400_1 | 0.06 | 154 | 155 |
| 400_1 | 0.3 | 96.4 | 105 |
| 401_1 | 0.06 | 90.3 | 86.5 |
| 401_1 | 0.3 | 100 | 86.3 |
| 402_1 | 0.06 | 81.2 | 72.8 |
| 402_1 | 0.3 | 36.6 | 31.2 |
| 403_1 | 0.06 | 114 | 109 |
| 403_1 | 0.3 | 118 | 114 |
| 404_1 | 0.06 | 74 | 58.9 |
| 404_1 | 0.3 | 69.7 | 63.7 |
| 405_1 | 0.06 | 106 | 103 |
| 405_1 | 0.3 | 111 | 112 |
| 406_1 | 0.06 | 92 | 72.5 |
| 406_1 | 0.3 | 60.9 | 53.6 |
| 407_1 | 0.06 | 103 | 102 |
| 407_1 | 0.3 | 113 | 105 |
| 408_1 | 0.06 | 83 | 80.2 |
| 408_1 | 0.3 | 86.5 | 77.6 |
| 409_1 | 0.06 | 117 | 119 |
| 409_1 | 0.3 | 61.1 | 53.2 |
| 410_1 | 0.06 | 107 | 95.8 |
| 410_1 | 0.3 | 86.8 | 88.9 |
| 411_1 | 0.06 | 80.9 | 81.1 |
| 411_1 | 0.3 | 56.4 | 52.6 |
| 412_1 | 0.06 | 68.8 | 63.1 |
| 412_1 | 0.3 | 66.5 | 60 |
| 413_1 | 0.06 | 105 | 93.7 |
| 413_1 | 0.3 | 85.5 | 82.1 |
| 414_1 | 0.06 | 110 | 111 |
| 414_1 | 0.3 | 73.9 | 73.2 |
| 415_1 | 0.06 | 94.7 | 93.3 |
| 415_1 | 0.3 | 68.8 | 62 |
| 416_1 | 0.06 | 104 | 90.2 |
| 416_1 | 0.3 | 64.6 | 58 |
| 417_1 | 0.06 | 95.3 | 85.2 |
| 417_1 | 0.3 | 64.7 | 54.8 |
| 418_1 | 0.06 | 69 | 61.3 |
| 418_1 | 0.3 | 68.9 | 60.8 |
| 419_1 | 0.06 | 105 | 107 |
| 419_1 | 0.3 | 167.9 | 66.8 |
| 420_1 | 0.06 | 115 | 92.4 |
| 420_1 | 0.3 | 64 | 57.1 |
| 421_1 | 0.06 | 100 | 104 |
| 421_1 | 0.3 | 77 | 74.7 |
| 422_1 | 0.06 | 105 | 98.4 |
| 422_1 | 0.3 | 68.2 | 56.2 |
| 423_1 | 0.06 | 73.8 | 60.5 |
| 423_1 | 0.3 | 66.2 | 63.2 |
| 424_1 | 0.06 | 84.1 | 72.7 |
| 424_1 | 0.3 | 73.1 | 72.9 |
| 425_1 | 0.06 | 96.8 | 93.6 |
| 425_1 | 0.3 | 72 | 73.8 |
| 426_1 | 0.06 | 120 | 109 |
| 426_1 | 0.3 | 96.5 | 85.2 |
| 427_1 | 0.06 | 102 | 104 |
| 427_1 | 0.3 | 79.7 | 72.8 |
| 428_1 | 0.06 | 88.9 | 77.2 |
| 428_1 | 0.3 | 53.5 | 49.8 |
| 429_1 | 0.06 | 41.2 | 34.4 |
| 429_1 | 0.3 | 17.3 | 13.2 |
| 430_1 | 0.06 | 72.7 | 64.2 |
| 430_1 | 0.3 | 48.2 | 41.6 |
| 431_1 | 0.06 | 61.7 | 53.2 |
| 431_1 | 0.3 | 28.1 | 23.7 |
| 432_1 | 0.06 | 61 | 64.7 |
| 432_1 | 0.3 | 26 | 26.1 |
| 433_1 | 0.06 | 42 | 32.4 |
| 433_1 | 0.3 | 26.1 | 23.7 |
| 434_1 | 0.06 | 49.6 | 41.6 |
| 434_1 | 0.3 | 13.7 | 10.8 |
| 435_1 | 0.06 | 102 | 105 |
| 435_1 | 0.3 | 134 | 159 |
| 436_1 | 0.06 | 135 | 145 |
| 436_1 | 0.3 | 93.3 | 94.9 |
| 437_1 | 0.06 | 79.7 | 74.6 |
| 437_1 | 0.3 | 44.9 | 42.5 |
| 438_1 | 0.06 | 85.8 | 79.5 |
| 438_1 | 0.3 | 79.2 | 75.9 |
| 439_1 | 0.06 | 71.6 | 72 |
| 439_1 | 0.3 | 80.6 | 74.6 |
| 440_1 | 0.06 | 96.1 | 00 |
| 440_1 | 0.3 | 97 | 94.4 |
| 441_1 | 0.06 | 98.6 | 84.8 |
| 441_1 | 0.3 | 171.9 | 63.2 |
| 442_1 | 0.06 | 137 | 125 |
| 442_1 | 0.3 | 81.8 | 84.2 |
| 443_1 | 0.06 | 117 | 106 |
| 443_1 | 0.3 | 67.3 | 58.9 |
| 444_1 | 0.06 | 70.8 | 58.6 |
| 444_1 | 0.3 | 38.4 | 34.8 |
| 445_1 | 0.06 | 115 | 123 |
| 445_1 | 0.3 | 83.5 | 82.1 |
| 446_1 | 0.06 | 99.8 | 88.6 |
| 446_1 | 0.3 | 77.2 | 70.8 |
| 447_1 | 0.06 | 92.7 | 95 |
| 447_1 | 0.3 | 52.7 | 55.1 |
| 448_1 | 0.06 | 59.7 | 48.1 |
| 448_1 | 0.3 | 75.3 | 65 |
| 449_1 | 0.06 | 75.2 | 76.2 |
| 449_1 | 0.3 | 24.6 | 25.2 |
| 450_1 | 0.06 | 91.1 | 77.4 |
| 450_1 | 0.3 | 68.8 | 68 |
| 451_1 | 0.06 | 117 | 121 |
| 451_1 | 0.3 | 37.6 | 34.4 |
| 452_1 | 0.06 | 74.4 | 74.6 |
| 452_1 | 0.3 | 43.3 | 39.5 |
| 453_1 | 0.06 | 67.4 | 60.2 |
| 453_1 | 0.3 | 55.9 | 53.3 |
| 454_1 | 0.06 | 73.9 | 63.4 |
| 454_1 | 0.3 | 30.6 | 22.8 |
| 455_1 | 0.06 | 48.4 | 40.7 |
| 455_1 | 0.3 | 20.7 | 17.1 |
| 456_1 | 0.06 | 72.5 | 57.7 |
| 456_1 | 0.3 | 54.8 | 44.3 |
| 457_1 | 0.06 | 134 | 125 |
| 457_1 | 0.3 | 72.1 | 73.9 |
| 458_1 | 0.06 | 107 | 98.7 |
| 458_1 | 0.3 | 66 | 56.2 |
| 459_1 | 0.06 | 87 | 72.9 |
| 459_1 | 0.3 | 87.9 | 83 |
| 460_1 | 0.06 | 106 | 102 |
| 460_1 | 0.3 | 79.8 | 75.8 |
| 461_1 | 0.06 | 91.5 | 76.5 |
| 461_1 | 0.3 | 95.3 | 88.6 |
| 462_1 | 0.06 | 102 | 88.5 |
| 462_1 | 0.3 | 75.7 | 69.7 |
| 463_1 | 0.06 | 74.1 | 71.3 |
| 463_1 | 0.3 | 64.8 | 64.6 |
| 464_1 | 0.06 | 109 | 98.8 |
| 464_1 | 0.3 | 56.2 | 51.8 |
| 465_1 | 0.06 | 83.8 | 79.2 |
| 465_1 | 0.3 | 65.5 | 64.2 |
| 466_1 | 0.06 | 120 | 108 |
| 466_1 | 0.3 | 78.9 | 92.1 |
| 467_1 | 0.06 | 97.2 | 91 |
| 467_1 | 0.3 | 87.6 | 84.6 |
| 468_1 | 0.06 | 101 | 92.6 |
| 468_1 | 0.3 | 100 | 104 |
| 469_1 | 0.06 | 158 | 152 |
| 469_1 | 0.3 | 93 | 90 |
| 470_1 | 0.06 | 103 | 102 |
| 470_1 | 0.3 | 61.3 | 56 |
| 471_1 | 0.06 | 151 | 131 |
| 471_1 | 0.3 | 105 | 102 |
| 472_1 | 0.06 | 108 | 107 |
| 472_1 | 0.3 | 118 | 114 |
| 473_1 | 0.06 | 126 | 126 |
| 473_1 | 0.3 | 120 | 114 |
| 474_1 | 0.06 | 88.2 | 76.5 |
| 474_1 | 0.3 | 62.2 | 50.1 |
| 475_1 | 0.06 | 125 | 97 |
| 475_1 | 0.3 | 94.8 | 91.8 |
| 476_1 | 0.06 | 111 | 121 |
| 476_1 | 0.3 | 89.3 | 89.3 |
| 477_1 | 0.06 | 93.7 | 94 |
| 477_1 | 0.3 | 90.2 | 89.3 |
| 478_1 | 0.06 | 84.2 | 87.6 |
| 478_1 | 0.3 | 84.2 | 88.7 |
| 479_1 | 0.06 | 91.1 | 84.3 |
| 479_1 | 0.3 | 99.6 | 100 |
| 480_1 | 0.06 | 82 | 83.9 |
| 480_1 | 0.3 | 69.5 | 59.7 |
| 481_1 | 0.06 | 95.3 | 86.8 |
| 481_1 | 0.3 | 60.3 | 48.9 |
| 482_1 | 0.06 | 96 | 100 |
| 482_1 | 0.3 | 102 | 102 |
| 483_1 | 0.06 | 78.7 | 73.8 |
| 483_1 | 0.3 | 43.8 | 36.4 |
| 484_1 | 0.06 | 80.1 | 72.5 |
| 484_1 | 0.3 | 70.1 | 64.2 |
| 485_1 | 0.06 | 86.2 | 83.4 |
| 485_1 | 0.3 | 46.7 | 41.3 |
| 486_1 | 0.06 | 101 | 96.1 |
| 486_1 | 0.3 | 59.9 | 59.1 |
| 487_1 | 0.06 | 111 | 112 |
| 487_1 | 0.3 | 88.3 | 87.3 |
| 488_1 | 0.06 | 125 | 124 |
| 488_1 | 0.3 | 113 | 111 |
| 489_1 | 0.06 | 114 | 105 |
| 489_1 | 0.3 | 88.2 | 87.2 |
| 490_1 | 0.06 | 89.8 | 85 |
| 490_1 | 0.3 | 50.1 | 45.1 |
| 491_1 | 0.06 | 117 | 104 |
| 491_1 | 0.3 | 57.3 | 55.3 |
| 492_1 | 0.06 | 88.1 | 76.2 |
| 492_1 | 0.3 | 68 | 65.1 |
| 493_1 | 0.06 | 61.8 | 51.2 |
| 493_1 | 0.3 | 52 | 47.1 |
| 494_1 | 0.06 | 153 | 135 |
| 494_1 | 0.3 | 109 | 101 |
| 495_1 | 0.06 | 103 | 108 |
| 495_1 | 0.3 | 106 | 104 |
| 496_1 | 0.06 | 127 | 122 |
| 496_1 | 0.3 | 82.3 | 79.5 |
| 497_1 | 0.06 | 66.8 | 60.2 |
| 497_1 | 0.3 | 66.6 | 66.5 |
| 498_1 | 0.06 | 97.7 | 95.1 |
| 498_1 | 0.3 | 84.9 | 75.7 |
| 499_1 | 0.06 | 94.2 | 87.9 |
| 499_1 | 0.3 | 73.4 | 69.6 |
| 500_1 | 0.06 | 147 | 129 |
| 500_1 | 0.3 | 79.3 | 73.6 |
| 501_1 | 0.06 | 106 | 99.9 |
| 501_1 | 0.3 | 71.8 | 64.3 |
| 502_1 | 0.06 | 67.9 | 66.1 |
| 502_1 | 0.3 | 53.3 | 52.3 |
| 503_1 | 0.06 | 123 | 121 |
| 503_1 | 0.3 | 88.4 | 84.7 |
| 504_1 | 0.06 | 85.7 | 72.8 |
| 504_1 | 0.3 | 41.4 | 36.7 |
| 505_1 | 0.06 | 190 | 180 |
| 505_1 | 0.3 | 117 | 119 |
| 506_1 | 0.06 | 124 | 113 |
| 506_1 | 0.3 | 116 | 102 |
| 507_1 | 0.06 | 90.7 | 84.9 |
| 507_1 | 0.3 | 94.8 | 102 |
| 508_1 | 0.06 | 73.2 | 73.6 |
| 508_1 | 0.3 | 49.4 | 48.1 |
| 509_1 | 0.06 | 74.7 | 73.4 |
| 509_1 | 0.3 | 50.7 | 41.7 |
| 510_1 | 0.06 | 83.7 | 66.8 |
| 510_1 | 0.3 | 28 | 23.9 |
| 511_1 | 0.06 | 71.5 | 72.7 |
| 511_1 | 0.3 | 43.6 | 41.1 |
| 512_1 | 0.06 | 54.7 | 48.2 |
| 512_1 | 10.3 | 30.1 | 23.8 |
| 513_1 | 0.06 | 96.9 | 98.2 |
| 513_1 | 0.3 | 45.4 | 41 |
| 514_1 | 0.06 | 70.5 | 63.9 |
| 514_1 | 0.3 | 21.6 | 16.9 |
| 515_1 | 0.06 | 65.5 | 55.1 |
| 515_1 | 0.3 | 27.1 | 23.5 |
| 516_1 | 0.06 | 107 | 82 |
| 516_1 | 0.3 | 68.7 | 59.9 |
| 517_1 | 0.06 | 49.5 | 38.6 |
| 517_1 | 0.3 | 18.6 | 12.8 |
| 518_1 | 0.06 | 33.1 | 25.6 |
| 518_1 | 0.3 | 9.6 | 5.9 |
| 519_1 | 0.06 | 35.9 | 31.6 |
| 519_1 | 0.3 | 10.2 | 7.3 |
| 520_1 | 0.06 | 29.6 | 22.4 |
| 520_1 | 0.3 | — | 7.1 |
| 521_1 | 0.06 | 84.8 | 80.2 |
| 521_1 | 0.3 | 24.1 | 17.7 |
| 522_1 | 0.06 | 88.6 | 89.8 |
| 522_1 | 0.3 | 41.4 | 38.4 |
| 523_1 | 0.06 | 45.2 | 34.4 |
| 523_1 | 0.3 | 14.8 | 11.6 |
| 524_1 | 0.06 | 65.2 | 61.4 |
| 524_1 | 0.3 | 32.1 | 27.3 |
| — | 0.06 | 103 | 95.2 |
| — | 0.3 | 66.5 | 60.9 |

[0287] From Table 8 it can be taken that the C4 pool is capable of reducing C4a mRNA and C4b mRNA efficiently at different concentrations.

1. (canceled)

2. (canceled)

3. (canceled)

4. (canceled)

5. (canceled)

6. (canceled)

7. (canceled)

8. (canceled)

9. A nucleic acid molecule of 12 to 30 nucleotides in length comprising a contiguous nucleotides sequence of at least 12 nucleotides which is at least 95% complementary to a mammalian C4 target sequence, wherein the nucleic acid molecule is capable of inhibiting the expression of a C4 mRNA.

10. The nucleic acid molecule according to claim 9, wherein the contiguous nucleotide sequence is fully complementary to a sequence selected from one or more of SEQ ID NOs: 3, 4, 6 and 7.

11. The nucleic acid molecule according to claim 9, wherein the nucleic acid molecule comprises a contiguous nucleotide sequence of 12 to 25.

12. The nucleic acid molecule of claim 9, wherein the nucleic acid molecule is a RNAi molecule.

13. The nucleic acid molecule of claim 9, wherein the nucleic acid molecule is a single stranded antisense oligonucleotide.

14. (canceled)

15. The nucleic acid molecule according to claim 9, wherein the nucleic acid molecule comprises one or more 2′ sugar modified nucleosides.

16. The nucleic acid molecule according to claim 15, wherein the one or more 2′ sugar modified nucleosides are independently selected from the group consisting of 2′-O-alkyl-RNA, 2′-O-methyl-RNA, 2′-alkoxy-RNA, 2′-O-methoxyethyl-RNA, 2′-amino-DNA, 2′-fluoro-DNA, arabino nucleic acid (ANA), 2′-fluoro-ANA and LNA nucleosides.

17. (canceled)

18. The nucleic acid molecule according to claim 9, where the contiguous nucleotide sequence comprises at least one phosphorothioate internucleoside linkage.

19. The nucleic acid molecule according to claim 18, wherein at least 90% of the internucleoside linkages within the contiguous nucleotide sequence are phosphorothioate internucleoside linkages.

20. The nucleic acid molecule according to claim 9, wherein the nucleic acid molecule, or contiguous nucleotide sequence thereof, comprises a gapmer of formula 5′-F-G-F′-3′, wherein regions F and F′ independently comprise 1-4 2′ sugar modified nucleosides and G is a region between 6 and 18 nucleosides which are capable of recruiting RNase H.

21. A pharmaceutically acceptable salt of a nucleic acid molecule according to claim 9.

22. A pharmaceutical composition comprising a nucleic acid molecule according to claim 9, or a pharmaceutically acceptable salt of the nucleic acid molecule and a pharmaceutically acceptable excipient.

23. An in vivo or in vitro method for inhibiting C4 expression in a target cell which is expressing C4, said method comprising administering a nucleic acid molecule according to claim 9, a pharmaceutically acceptable salt of the nucleic acid molecule, or a pharmaceutical composition comprising the nucleic acid molecule in an effective amount to said cell.

24. A method for treating a disease comprising administering a therapeutically or prophylactically effective amount of a nucleic acid molecule according to claim 9, a pharmaceutically acceptable salt of the nucleic acid molecule, or a pharmaceutical composition comprising the nucleic acid molecule, to a subject suffering from or susceptible to a neurological disease.

25. A method according to claim 24, wherein the neurological disease is selected from the group consisting of a tauopathy and schizophrenia.

26. (canceled)

27. (canceled)

28. (canceled)

29. (canceled)

30. (canceled)

31. A method for diagnosing a neurological disease in a patient suspected of a having a neurological disease, said method comprising the steps of
a) determining the amount of one or more C4 nucleic acids in a sample from the subject, wherein the determination comprises contacting the sample with one or more nucleic acid molecules as defined in claim 9,
b) comparing the amount determined in step a) to a reference amount, and
c) diagnosing whether the subject suffers from the neurological disease, or not, based on the results of step b).

32. The method of claim 31, wherein the sample is contacted in step a) with said one or more nucleic acid molecules under conditions which allow for the hybridization of said one or more nucleic acid molecules to said one or more C4 nucleic acids present in the sample, thereby forming duplexes of said nucleic acid molecules and said C4 nucleic acids.

33. A method for manufacturing a nucleic acid molecule as defined in claim 9, comprising reacting nucleotide units and thereby forming covalently linked contiguous nucleotide units comprised in the nucleic acid molecule.

34. The method of claim 33, wherein the method comprises the introduction of one or more sugar-modified nucleosides, of one or more modified internucleoside linkages, and/or of one or more modified nucleobases into the nucleic acid molecule.

The application's sequence listing, which the Patent Office published only in electronic form, follows.

SEQUENCE LISTING (563 sequences)

SEQ ID NO: 1 - DNA, 14373 bp, Mus musculus
  source 1..14373: mol_type = other DNA
gatcagaagggagcagacagtcagaccagacaggttgacctctcctggatcctccagccatgcggctcctctgggggctggcttgggtgttcagcttctgtgcctcatccctgcagaagcccaggtcccggggaagacactggcgtttgcgtgggccaggggtgagagagagtggggtggtggggttcggctgggtctgaagatgtacctcactgttctcctaggttgctcctgttttccccttctgtggttaatttggggactcccctgtcagtgggggtacagctcctggatgcccctccaggacaggaggtaaaaggatcagtgttcctcagaaacccaaagggtggttcctgctccccaaagaaggactttaagctgagctcgggagatgactttgtgctgctcagccttgaggtaaccagtaccagcacccctgctgtttctcaggtctctctgctgcaccccattgtctgcttatttagcagcagacaggagcttgttatgtgacataggctggctttgaactcacagctgtcctcttgcctcagcccccaaagtgctaagatttacaagtacacctggtttgcctgttgccttttgttttattgtttagttttgcttttgagacgggatttcagggtgtaacctagattgattgaaattgctcagtgaccctactgtgggcctctcaagtgttgggattacagccgggagccattgtgcctggcacttctgttgccttttccatccctgtccccctcaatgacttcctacctctctctcctctggcacaatggccttgctgtccctaccttaggctctgtattgtgttccttttgctctgtttgatagtctccttctgtcttgataggtcccactggaagatgtgaggagctgtggcctctttgacctgcgcagagccccctacatccagctggtagctcagtctccgtggctaaggaacacagctttcaaagccacagagactcagggtgtcaacttgctctactcttcccgacgaggccacatctttgtgcagaccgatcagcctatctataatccggggcagcggggtgagcctccagccccggggcctttgctctgtctctcccaggctgctcagggcatgtttggtgccttccatgtaaggcaacttcacagatagagccaccctgggggcttgattagcagttaggtccccgttgtctccctgcaacagctcagttctgtttgctcaggactcttacctctcacccccaccttccctcatccttctcttagttcgttatcgggtctttgcactggatcaaaagatgcgcccatccactgatttcctcaccatcacagtggaggtgagtgtctgacctctgaccctcccaacactgtgcactgatgtgacctcccacttgaccacatcgactcccctcacagaactcccatggcctccgtgtactcaagaaggagatatttacttccacatccatcttacaagataccttcaccattccagacatctcagagtgagctctcccaccttagggtttccctttatctgtaccaccccaaggcctgcttcccttggcactgtccaccacctctgacagacagaggcacgttccagatgttctgaccctgcccctcccagatctctggtcataccacagctttcttctggaggaatcaggccatagctgtctgtaggtagcctggactcactcacactaaagttgtctatgggtgggtagcctggactcactcaggccatggctgtctgtcggtgggtagctcaactccctcccttgtccattttcaggcctgggacctggaagatctcagctaggttctcagatggactggagtccaataggagcacccactttgaagtgaagaagtatggtgagtgctgaagtacggggtagaggagggtgaggtgggcagcctgaggggaggaccctgtctctagtacctggccacccatctcttcacccttattcagtccttcccaacttcgaggtgaagattactccttggaagccatatatcctgatggtgcccagcaacagtgatgaaatccaattagacatccaggccaggtacccaccctcctgccctgcctcactcctccatctttgcaaagcccagcttccttgcacccttggctttcctcttttttcctcttttatttgagagtttttgagacagagtctcacacccactgtatactcaccgtgtagtcctgtctggccttgaacttactgagctccatctgcctctgcctcttgagtgctgggattagggatgtgcatgcgtgtgtctatgtgtgcaggggaatgtgtgtgtgtacatctgtggaggccagagaaaacctatggtgtcctccttggagacacacactcattgcagtggaactcactgactgggctaagctggctgtccaggcaaccctcagaacccccacctctgtgctcccaatgctgggatcacattggatgctgccacgccaccgggcatttctacagggatcctggggcaccgaactcaggtctttgtgctttcttggcaacactttaccacctgagttattgccccagccctcagctctcctcctgtctccccatgacaacaggtacatctatgggaagcccgtgcagggcgtggcatacacacggtttgcgctcatggatgagcaagggaagaggactttccttcggggcctagagacgcaggccaaggtagggtagcgtcaagggggtgacaaggggaagtggggacctagcataactcacagccttttctcttcttcttagttggtggaaggccggacccacatttccatctcaaaggaccagttccaggctgccctggataaaatcaatattggggtcagagacctggaggggctgcgtctctatgctgctacagctgtcattgagtctccaggtgggtggcttccctctgctggcacttcaagccttgcccttgagagaacaccctcaggggcagtttaaaaatgcaaatggcaccatcagacagcctctggtcctcaccatccagtacagctcctgatgccaacacagacccaggtcctcccatcacagtcctgtcctttcctgtctccttttatctaactgtttccagtcactctcctcttggttcaacatctgataggccgtgcacacatgtgcagatgaagcagtgcacaaccagttcttggttcccttccctagtttctgccctctggctcttgcctccccttccctgggttttgccctccatctctctgctctctgtcttgcaggaggagagatggaggaggcagaactcacgtcctggcgctttgtatcatctgccttttccttggatctcagccgcactaagcggcatctcgtgcctggagcccacttcctgctgcaggttcctcttggaagggcagggctggaggggagagggtatgggccacacagtcttaatgacgcttctttctgactgtctcctccaggccttggtcagagaaatatcaggctctgaagcctctaacgttattgtcaaagtttctcccacattggtgtcaggctctgattcccaagtcctcaacgttcaacagagcaccaatagaattggccaagtcagcatttccttccccatcccaccaaccgtcacaggacttcggctcttggtagtgcttccctgaggactggggatgggcatggaggcagggagggtgcatgagttgtttcctgggtgcttctgatggagtttgggagaagggatggcacatttgggtccttggcatagaccctgcccttcatgccttcaggtgtctgcgggctccctctacccaatgatagccaggctcaccgtgcaatccccaccttcaagaggcactggctttctttctattgagccactagaccctcggtcccctcgtgtgggggacacctttatcctaaacttacaagctgtgggcatccctgcacctaccttctctcattactactacatggtatgtgggacttggggtataggagtgctggggttggactcggggcagggtgtataccaagcaggaagccactcactgcctccccatggctcagatcatctccagaggccagatcatggctatgagtcgggaggcccggaggaccgtgacctctgtctccgtgttggtggaccatcagctggctccttcattctacttcgtggcttacttctatcaccaaggacacccggtggccaactctctgctcatcaacatccagcccagggactgtgagggcaaggtgactgggtctggataggtggtgtgggctgtggtttgtgtgtgtgtgcatgtgtgtgcacatgcctgttagcctgcatgttcatgtgcatgtgtgtgcacacatgcacatgcgtgtttatgtacatgtgtgtgctgaaatgcatgtatgtgcatgtatgcttgtgtgtgtgcatgttcaagtgtgcatgtgcacccaggggttcagaggaggacaggatgactggtttagccactgagtgtgcatggggctggaggtgagagttcactctttttcttttttcctcttcacacatgtgaggtgggcatgtgtgtgtgcacattttgcatgctgcatggtgcatgtgcttgtagagagctgggggtcatctgtcttactcttcagccttagtcattggggcagtttctttcactcaagcctatagctcactgataagcctcatcttctaaccaccttgttctggggatcccacccacccaccctgtctctgcctttccaggctggaatgacaggcatgccctcacccccacctggattctggggttcagtcctcatgcatggatggcacacctcttaattactgacccatgtccccagcccactctccatgtgctgattgtctttttcctcccatttctgccagctgcaattgaaggtagttggtgccaaggagtatcataatggggacatgatgaagctccgaattcaaactgactccaaagccctggtggcactgggagctgtggacaccgctctgtatgctgtgggcggttggtctcacaaacccctcgacatgagcaaggtttgtcaaaccttctccatgcatccttcttctcttcctccttgtccttctcttcctcctcccccctcctctccctcttcatcttccttctcctctttctcctcctccttgccctcttcctcctccttccctcctcctctgcctcctcctcctcccccttcctccccctcctcttaatcctcctcccatcttcatactccttctcctcttccctctcctcctccttgcttaaggtctggggcttagttctcaggtctcagtccctataggctcttcccagtcttcccttgcgtcctagatgttcttggtctccccactcgcttctctcatctttgagccgtaccctaataccctcagctgagtggcagatcctgctcctcagttgctcacatctcccagcatctcttgccttttcctgctaggtctttgaagtaatcaacagctacaatgttggctgtggtcctggaggtggggatgatgcccctcaggtgttccaggatgctggtctggccttttctgatggtgatcgactaactcaaaccagagagggtaagaacgtagtgagtgggagcagacgaaggagaaaaggccgtgtgtgtgtgtgtgtgtgtgtgtgtgtgcacgtgtgtgtgtgtgtgtgtgtctttctgtgtgtatgtgtgtgtctgggtgtctgggtgtgtgagattcatgggtctaaatgtgggtgggctgagggatggagaaagaggaggcttgacgactctcttgctctctaccagacctgagctgtcccaaggagaagaaaagtcggcaaaagagaaatgttaacttcctgaaggctcttagtgagaagtgtatgttgtgggtgcccatggagcactgggagccatgtcttggggtcagggtgggatctgcttctctgccctctgcagccccctggccagttgtggtatggagggtgaggaggccaagggctgaggtggaggctggctggtgcagtccatcggcctgctgacttctccccgagcacgtgctggtggttctaggtttgatggatgctgaggcttcagtccctcccacctgcctagccttccctggcccagcagtgggccagtattcttctccagatgccaagcgctgctgccaagacgggatgacgaagctgcccatgaagcgtacctgtgagcagcgggctgcccgtgtgcctcagcaggcctgccgtgagcccttcttgtcctgttgcaagtttgctgaggaccttcgcaggaaccagaccaggagccaggcaccccttgcccgaagtgagcagccagatgaagctgagggagggatgggcggtgacgcctgagagggcaacacattccctcctcaatgccgtccccactgcccccagaggtccgggacatggtgaatttgatagaggaagatgacattcttgtgcgcacctccttcccagagaactggctctggagagtggaacctgtagacagctccaaactgtgagggcctggcatgcctgatcttgcctctgggctgggtctggggagagtgacaaggctgtgagcaacagggcttctctgcattccccccgaccctcccacaggttgacagtgcggcttcctgattctatgaccacatgggagattcatggtgtgagcctgtccaaaagcaaaggtgaggcggtgctgtccagacgtcttctcatccctccatgctctgaccctccctctgctctctgcatggatctggggaaaatcttccctggcttgcctgcaggcaagagcagagggcggtcattccagaacccttcctccccgaggcctgaggtccatctctgtcactgccccatctccctgtccacaggtctgtgtgtagccaagccaactcgtgttcgagtgttcagaaaattccaccttcacctgcgcctgcccatctccgtccgccgctttgagcagcttgaattacggcctgttctctacaactatctgaatgatgacaagaacgtgagaccgtaggggagcctgagcatccagggtgggcatagggaggggtgcagccagggacaggtcaggtcaggcagtggtcctgatcacattagggatcgctgtccatctctgtttcctgtccccaggtgagtgtccatgtgaccccagtggagggcctgtgcatggctggtggtggaatgatggcccagtgggtgatagtgcctgcaggctctgccctgcctgtggccttctctgtggtacccacagcttctaccaacgtgcccctgaaattggtggctaaagggactttggattcaagcgattctgtgtctaagattctccaaattgaggtgaatgactgcatggaaatctagccaccccactccccgggctcctagccatttaacattccattggccaggccatggttctgcactcaaacccagtgcatggataaacttacaatccactattgtgactcaattgtttacttatattgagacagaggctagctatgtagcccaggtttgcttcaaactccctctgtagtccaggctggccttgaacattcagtaatccccctgcctttgcctttggaattactagtctacaggcaccactgtcacacctagccggctgtctctgaaacagtttgttctcttttatgttatttgtttggtcatgggggttaagtccaggaccttgtacatggtagagaagtgagtttagtccctgtttctgattgcgaagttcacatgccaagacccaggggtgttcacccagaggggaggctgtagccatggctaatcccccactgtattttccaattgagacagaaggaaggagccatccacagagaagagatagtctacaacctcgaccccctaagtgagtagggctcccccagccactagtaccctagtagagttatggggcacaggggctcacccaccagctcctctcctctgcctagataacctaggtcagatgttggagatacctggcagctcggatcccaacatagtccctgaaggagacttcagcacctttgtcaaggttacaggtgggtccagacctttcccatgagcctctgtgttcacctgaagtccatggttgtagtcttctggtgctgagtgcatagacccagtctcatcttcaacttctctgtcctttagcctctgaacccttggagactctgggctctgaagaagctttgtccccaggaggcgtggcctccctcctgaggcttcccggagctgcgcagagcaaaccatgatctatttggctcctaccctgactgcttccaactacctggacaggacaaaacagtggagcaaactgtcccctgagaccaaggaccatgctgtgcatctgatccagaaaggttctgggttaagggaaagcaagagtcagagccagggagggcatgaaaggcagccaggagcctagagagagaagctggggtcaagggtagggcgctgggagtacagtcctggcccaaacagcaggagagtaggaaccttggcacctcttttttcccaggccacgttcggatccagcagtttcggaagaaagatggctcttttggggcttggttacaccgggacagcagcacctggtgaggctggggactctgttcagggcagccagaggtcaaaaagcaaccagccaggtctcctgagagactagcattttctccagccaagccccctccgctctaggctgactgcctttgtgctgaagattctgagtttggcccaggaacaggtgggcaactccccggagaagctgcaggagacggctagctggctgctggcccagcagctgggtgatggctccttccacgacccatgtccagtcatccacagagcaatgcaggtgtgaacacgctggaggcacgtgtaggatgtcagcaggaagacgggctcctcacaactctggcctgacagcctctctctctctcctcactaggggggcttggtggggtccaatgagacggtggcactgaccgcctttgtggtcattgcccttcaccacgggctgaacgtcttccgggaggggcatgcgaagcagctgaagaacagagtggtaaggaagccgtgctctgttcttcctgcctggccatccttgccccgggagcccgggcatgcaggctcaggcctctgctctcttctaggaagcctccatcaccaaggcaaactctttcttggggcagaaggcaagtgctgggctcctgggtgcccatgccgccgccatcacagcctatgcccttacgctgaccaaggcctcggaggacctgcggaatgttgcccacaacagcctgatggccatggctgaggaaacggggggtgagggcgagggcaccctggcagagcacctgggacttggggcccttgggatgcctgaaaagggctgaaaagaaggggcctctcatggctgtggagtggaagcaggggctgccgacagggggcgccagagatcctggcggctcagctcctcacctgtagtttccttgttcaatatgtatttccctcccttccagaaaacctctactggggcttagtccttggctctcaggacaaagttgtgttgcgccccgcagacccccgtagcccaacagaacctgtgccccaggccccagccttgtggatcgaaaccacagcctatgccctgctccacctgcttctgcgtgagggaaagggaaaaatggctgacaaggctgcatcctggctcacccaccagggaaacttccacggggcattccgcagtacccaggtaggggcagccacagggctcgctcagggtaggtggttctgagaccaagtgccccactcccaccctaacctcctcaggacactgtggtcaccctggatgccctgtctgcctactggatcgcttcgcacaccactgaggagaaagcactgaaggtgacgctcagctccatgggccgcaatgggctcaaaacccacgtgctacacttgaacaaccaccaagtcaagggcctggaggaggagctgaaggtgacctcctccatccctgatggggttgctggggtattgggcccaggtagaagcctctgtccaatgcccagtccagccctctcctgagggtgtggtggggagactgactttcttctggccgtttggtcaaacctctgggctcttcttccttcatctgtaaaacagtgtgtctatagagtccacaccagggtctaggtcagtgtttcttagttttcagaacgctgtgacactttagtacagatcctcatgttgtggggaccccaaccatgaatatatttcattgttacttgatgaccctaattctgctagttatgaattgtaatatctgacatgcaggatatctgatacacaactcccaaagggtcacaggttgggaaccgctggtctagttgttctggagattgacactgtagccaagcacaagtttctgggatagaggttgtgtgtggggctactactggtctgctcccctgtgccatctgacctgctgcctctccctcctggcagttctccctgggcagcacaatcagtgtcaaggtggaaggaaacagcaaaggcaccttgaaggtgaggggagagtggtgcaggggtgagaagggagggggtgcagaggtggaggagggagagggtactggggtggggtgcaggttggggagcttgggtgtaggggccagtgggggtaagggagtaaagtgtacaggggtgggttttaggagggtgtagggaatggggaagggtggaggatgtagggtgaggtggggagttggacatggagtaccatggttgagtgaggtaggacagctaggtgagaagaggtggagtggaggtgtggggtgcaggggtaggcatgggcggtgggtggggtggggagctgggccttgactgggactttgtggcgtagcatgtgtattggggaggaggaggccatctcctggcttggtgtcccctgttccttccctgagcctccatctttgctctggtctggtttccctccatttctgggtgtctgacgtctccttcagctccatcctgagtacctcagacctaggtccccatgagctccccccccccccccgtttcttcctttatgtctcacttgacccagggcacccatagatgtcttggtagctccctcctctggcccaggtaactcttgcctcctgtcacactaatccctctgatcactgccagcatggcagtgaggccaacagcctggggaaatgtgccccttccagaatgaagtggagtcaggaggatcagtggcccaaagtcatctttgctgtgcccagtgtgagcccaggctatgagagaagccaggagcaggcagctttctggcaggctgggctctcaggacggctccacccctcactgcagctgcatcccaccccttgcctggtgtgctgctattcactggggtccgggatggggcaagggaagagttggggcctcagatccttcagcccaggcaccccttcaaatctgtgccatatgtgtcctgtgtctctccccctctctgactgaggcagatccttcgtacctacaacgtcctggacatgaagaacaccacatgccaggaccttcagatagaagtgaaggtcacagacgctgtggaatatgcatgtaagccccggggtcagggggccttgactgacccctgcaggggggtctgacaggggcttctgcctcctcaccactgtactgcacagggagcgcctacgaagactatgaagacgactataacatgccagccacagatgatcccagcgttcccttgcagcctgtcacgcccctgcagctatttgagggtcgtcggagccgccgcaggagggaggcccccaaggtggctgaagagcgggagtccagagttcactacactgtgtgtatctggtgagtgctgagagctctagggagaatggtgttgggaagaggcggggtgtggcacagtctgagagtctatacatccggcttctcctcccactaggcgcaatggcaagctggggctgtctggcatggccatcgcagacatcaccctcctgagtggattccacgccctgagggctgacctggagaaggtacagtcacccacagacacctctccatccttaggagccgacctccctctttgtagcaaccccaagtgttgaacccagtctcacaatgaccagggtccctgacctgtggctacctcctctttcctgcagctgacctctctctctgaccgttacgtgagtcactttgagactgacgggccccatgtcctgttgtactttgactcggtgagtaaagagaagtttcacagaaggggacactgggtttttgagtctgtatgataagggtcagatgtgtcaggtggccttagagaactcacagcttctcccacatgtcaccatgaggccggggctgtgacctcagcttagcaaggtttatggggagccacggagaggtggagtccaccgtggacactcactgggagactctgagggcctgctcgggcacctgctcctgggaaaggagggagcaggggaggcaggactgattcagagtctgacccacatcatggagggtttcacaggaagtgcctgtagcacacagaggtcctgggacaaggtctccctattggcagtgaagtcatcagaggccttggggaccagattttagagtctagtggcagagaagtgacagcatgaaggatcctggagacaaggccatggcaagcagtccaaggcaaggcattgaaggcagccctggcttggccctgagcaggcttccatcttccatcctggggccaggtccctaccacccgggagtgtgtgggctttggagcctcacaggaggtggttgtgggactggtgcagccagccagcgctgtcctgtatgactactacagccctggtgagcacttgggatgctttggcaagcatgattgtgggggttagccctctcatcggggacaccgcggggtgggggaggcctgggctccaagaggccctcatgtcttgccgcctttctctagatcacaagtgctctgtgttttatgctgcacccaccaagagccagctcctggccacactgtgctctggagatgtatgccagtgtgccgagggtgagaggagacccaggttgggggaaagggggattggctgggagggcaagctggtctcatgtgacaccttcctgcagggaagtgccctcgactgctaaggtcactggagcgaagggtggaggacaaggacggctaccggatgaggttcgcctgctattatcaccaagtggagtatggtcagtccctcctcggcctccattccccttggcacgggctccttgtgctcttggggttgcctgctcttcccccacccccacctgtggcctccctgctttgccctgactgcctcccccttccctgtccctcccaggcttcacggttaaggttcttcgagaagatggcagagctgccttccgtttctttgagtccaagatcacccaagtcctgcatttcagtaggaaggaggaatgggcagacaagcaggctagggagtggtggaggctgaggtctgggtgtggggcttcttggaaatgggaaatctcaaagtctgaatgtgacccccaccatcctgctgtctccccagaccctggtcattgggaacctgggcttgctcatagtgagcaacaagttctgtagggagcaacgtggcttaaacagcaggatctacacagagtcctgcccaaggtttctcctggccctttcttttcctctgatggctccatctctttattccctcaggaacggacaccatggcctccataggtcagacccgcaacttcctgagccggacctcttgccgccttcgtttggagcctaacaaagagtacttgatcatggggatggacggggaaaccagtgacaacaagggagagtgagtcccccagtccctcccttgctctcctcatacctgtgaccttccttttggggacagatcctaggcacctagctctgcctctccaaagccaaacgccttgagtacatgtccttaccctactatgtcacctgcagcccccagtacttgctggactcaaatacctggattgaggagatgccttcggaacaaatgtgcaagagcacccgccatcgggcagcctgtttccagctcaaagacttcctgatggagttcagcagccgggggtgccaggtgtgaggccttaggactctggctctctgagctcagctcagggtcagggcctcgctggatgaggggctctgctctacagggtaaataaaagaaaagctttttgacagccaa

SEQ ID NO: 2 - DNA, 15503 bp, Mus musculus
  source 1..15503: mol_type = other DNA
agaagggagcagacagtcagaccagacaggtctgacctttcctgaatcctccagccatgcggctcctctgggggctggcctgggtgttcagcttctgtgcctcatccctgcagaagcccaggtcccggggaagacactggcgtttgtgtgggccaggggtgagggagagcggggtggtggggttcggctgggtctgaagatgtacctcactgttctcctaggttgctcctgttttccccttctgtggttaatttggggacccccctgtcggtgggggtacagctcctggatgcccctccaggacaggaggtaaaaggatcagtgttcctcagaaacccaaagggtggttcctgctccccaaagaaggactttaagctgagctcgggagatgactttgtgctgctcagccttgaggtaaccagtaccagcacccctgctgtttctcaggtctctctgctgcaccccattgtctgcttatttagcagcagacaggagcttgttatgtgacataggctggctttgaactcacagctgtcctcttgcctcagcccccaaagtgctaagatttacaagtacacctggtttgcctgttgccttttgttttattgtttagttttgcttttgagatgggatttcagggtgtaacctagattggttgaaattgctcagtgaccctactgtgggcctctcaagtgttgggattacagccgggagccattgtgcctggcacttctgttgccttttccttcccatccccctcaatgacttcctgcctctctctcctctggcacaatggccttgctgtccctaccttaggctctgtattgggttccttttgctctgtctgatagtctccttctgtcttgataggtcccactggaagatgtgaggagctgtggcctctttgacctgcgcagagccccccacatccagctggtagctcagtctccgtggctaaggaacacagctttcaaagccacagagactcagggtgtcaacttgctcttctcttcccgacgaggccacatctttgtgcagaccgatcagcctatctataatccggggcagcggggtgagcctccagccccagggcctttgctctgtctctcccaggctgctcagggcatgtttggtgccttctatgtaaggcaactccacagatagagccaccctaggggcttgattagcagttaagtccccgttgtctccctgcagcagttccattcggtttgctcaggactcttacctctcacccccaccttccctcatccttctcttagttcgttatcgggtctttgcactggatcaaaagatgcgcccatccactgatttcctcaccatcacagtggaggtgagtgtctgacctctgaccctcccaacactgtgcactgatgtgacctcccacttgaccacatcgactcccctcacagaactcccatggcctccgtgtactcaagaaggagatatttacttccacatccatcttccaagatgccttcaccattccagacatctcagagtgagctctcccaccttagggtttccctttatctgtaccaccccaaggcctgcttcccttggcactgtccaccacctctgacagacagaggcacgttccagatgttctgaccctgcccctcccagatctctggtcataccacagctttcttctggaggaatcaggccatagctgtctgtgggtagcctggactcactcacactaaagttgtctatgggtgggtagcctggactcactcaggccatggctgtctgtcggtgggtagctcaactccctcccttgtccattttcaggcctgggacctggaagatctcagctaggttctcagatggactggagtccaataggagcacccactttgaagtgaagaagtatggtgagtgctgaagtatggggtacaggagggtgaggtgggcagcctgaggggaggaccctgtctctagtacctggccacccatctcttcacccttattcagtccttcccaacttcgaggtgaagattactccttggaagccatatatcctgatggtgcccagcaacagtgatgaaatccaattagacatccaggccaggtacccaccctcctgccctgcctcactcctccatctttgcaaagcccagcttccttgcacccttggcttttctttttcttgatctattatttgagattttttgagacagagtctcacacccactgtatactcaccgtgtagtcctgtctggccttgaacttactgagctccatctgcctctgcctcttgagtgctgggattagagatgtgcatgtgtgtgcctatgtgtgcagaggaatgtgtgtgggtacaacctcttgtgtcttccttggagacacacactcattgcagtggaactcactgactgggctaagttggctggcctggcagccctcagaacccccacctccatgctcctaatgctaggatcacacaaggaggctgtcacatctctgggcatttctacagggatcctggggcaccaaactcaggtctttgtgctttcttggcaacactttaccacctgagttattgctccagccctcagctctcctcctgtctccccatgacaacaggtacatctatgggaagcccgtgcagggcgtggcatacacacggtttgcgctcatggatgagcaagggaagaggactttccttcggggcctagagacgcaggccaaggtagggtagcgtcaagggggtgacaaggggaagtggggacctagcataactcacagccttttctcttcttcttagttggtggaaggccggacccacatttccatctcaaaggaccagttccaggctgccctggataaaatcaatattggggtcagagacctggaggggctgcgtctctatgctgctacagctgtcatcgagtctccaggtgggtggcttccctctgctggcacttcaagccttgcccttgagaacaccctcaggggcagtttaaaaatgcaaatggcaccatcagacagcctctggtcctcaccatccagtacagctcctgatgccaacacagacccaggtccccccatcgcagtcctgtcctttcctgtctccttttatctgtttccagtcactctcctcttggttcaccatctgataggccgtgcacacatgtgcagatgaagcagtgcacaaccagttcttggttcccttccctgggttctgccctctatgtctctgctctctgtcttgcaggaggagagatggaggaggcagaactcacgtcctggcgctttgtatcatctgccttctccttggatctcagccgcactaagaggcatcttgtgcctggggcccacttcctgctgcaggttcctcttggaagggcagggctggaggggagagggtgtgggccaaacagtcttgatgacacctctttctaactgtctcctccaggctctggtccaagaaatgtcaggctctgaagcctccaacgttcctgttaaagtctctgccacattggtgtcaggctctgactcccaagtccttgacattcaacagagcaccaatggaattggccaagtcagcatttccttccccatcccaccaactgtcacagaacttcgactcttggtagtggttctctgaggactgggatgggcatggaggcagggagggtgcatgagttgtttcctgggtgcttttggtggagtttggtggaaggggtggcacatttgggtccttggcatatcccctgcccttcatgccttctctccaggtgtctgcgggctccctctacccagccatagccaggctcaccgtgcaagccccaccttcaagaggcactggctttctttctattgagccactagaccctcggtcccctagtgtgggggacacctttatcctaaaccttcaacctgtgggcatccctgcacctaccttctctcattactactacatggtatgtgggacttggggtataggagtgctgggtgtaggactcggggcagggtgtataccaagcaggaagccactcactgcctccccatggctcagatcatctccagaggccagatcatggctatgggtcgggagccccggaagactgtgacctccgtctctgtgttggtggaccatcagctggctccctcgttctactttgtggcttacttctatcaccaaggacacccggtggccaactctctgctcatcaacatccaatccagggactgtgagggcaaggtgactgggtctgtgggctgtggtgtgtgtgtgtgtgcttgtgtgcatgtgtgtgcacatgcctgttagcgtgcatattcatgtgcatgtgtgtacacatgtgcagatgtctgtatgtacatgtgtgcttgaatgcatgtgtacttccctatgcaggtgtgcatgtatgcttgtgtgtgtgcatgttcaagtgtgcatgtgcacgcaggggttcagaggaggacaggatgactggtttagccactgagtgtgcatggggctggaggtgagagttcactctttttcttttttcctcttcatgcatgtgaggtgggcatgtgtgtgtgcacattttgcatgctgcatgggtgcatgtgcttgtagagagctgggggtcatctgtcttactcttcagccttagtcattggggcagtttctttcactcaagcctatagctcactgataagcctcatcttctaaccaccttgttctggggatcccacccacccaccctgtctctgcctttccaggctggaatgacaggcatgccctcacccccacctggattctggggttcagtcctcatgcatggatggcacacctcttaattactgacccatgtccccagcccactctccatgtgctgattgtctttttcctcccatttctgccagctgcaattgaaggtggatggtgccaaggagtatcgtaatgcggacatgatgaagctccgaattcaaactgactccaaagccctggtggcactgggagctgtggacatggctctgtatgctgtgggtggtcggtctcacaaacccctcgacatgagcaaggtttgtccaaccttcttcatgcatcctttatcctctttctcctcctcttcttcctcctctcctcctcctcctcctgtgcctctgccttgtcttcctcctccttctccttctccttttcctcctcctccttcccctcttcttccttttcctccttctcctcctcctcctctttctcctcctcttccttctcctctcctcctcctcctcctgtgcctctgccttgtcttcctcctccttctcctcctccttttccttctcctccttctcctcctcctcaaacttctcctcttcctcctccactttgtcctcttcatcctcctccttctcctcctccttgtcctcttcatcctcctccttctcctcctccttgtcctcttcctcctcctcttccttctccttttctcccttctcttctcctcttccttattctcttcctcctcttcctcctcctcctccttcccctcttcctccttttcttcctcctcctccttcttctcttcctcctcatcctattcctcctcctcctttttcttttcttcctcctcctcttccttcccctccttttcctcctcttcctcattctccacctccttttccttctcctcctcctcttcaaacttctcttccttctcctctttctcctcttcctcctcctttttttcctctttctcatcctcctcctcttcttcctccttctcctattcttcttccttcttctattcctcctcctccctctcttcgtactactccttctcctcctcctcccccttttctatctcctcctcctctccctcttcttcctcctcttcttcctcactcctctcctcttccctctcctcctcctcctcctacccctcctctccctcttcttcctcctcctcctcctatcttaaggtctggggcttagttctttagtctcagtccctataggctcttcccagtcttcccttgaatcctagatgttcttggtctccccactcgcttctctcatctttgagccataccctaataccctcagctgagtggcagatcctgctcctcagttgctcacatctcccagcatctcttgccttttcctgctaggtctttgaagtaatcaacagctacaatgttggctgtggtcctggaggtggggatgatgcccttcaggtgttccaggatgctggtctggccttttctgatggtgatcgactaactcaaaccagagagggtaagaacgtagtgagtgggagcagaagaaggagaaaaggccgtgcgcatgtgtgtgcacctgtgtgtatgtatttgtgtgtgtttgtgtgtatctgtgtctgtgtgtgtatgtctgtgtgtgtgtgtgtgtgtgtgtgtgtgtgtgtgtgtgtgtgtgtcttagtcagggtttctattcctgcacaaacatcatgaccaagaagcaagttggggaggaaaggatttattcagcttacacttccatactgctgttcatcactaaaggaagtcaggactggaactcaagcaggtcaggaagcaggagctgatgcagaggccatggagggatgttctttactggcttgcttccccctggaatgctcagcctgctttcttatagaatccaagactaccagcccagagatggtcccacccacaaggggcctttcccccttgatcactaattgagaaaatgccttacagttgggtctcatggaggcatttcctcaactgaagctcctttttctgtgataactcctgctgtgtcaagttgacacaaaactagccagtacagtgtgtgtgtgtatgtgtgtgtctgtgtgtgagattcaggggtctaaaggctgggtgggctgagggatggagaaagaggaggcttgacgactctcttgctctctaccagacctgagctgtcccaaggagaagaaaagtcggcaaaagagaaatgttaacttccagaaggctgtcagtgagaagtgtatgttgtgggtgcccatggagcactgggagccatgtcttggggtcagggtgggatctgcttctctgccctctgcagccccctggccagttgtggtatggagggtgaggaggccaagggctgagggtggaggctggctggtgcagtccatcggcctgctgacttctccccgagcacgtgctggtggttctaggtttgatggatgctgaggcttcagtccctcccacctgcctagccttccctggcccagcagtgggccagtattcttctccagatgccaagcgctgctgccaagacgggatgacgaagctgcccatgaagcgtacctgtgagcagcgggctgcccgtgtgcctcagcaggcctgccgtgagcccttcttgtcctgttgcaagtttgctgaggaccttcgcaggaaccagaccaggagccaggcacaccttgcccgaagtgagcagccagatgaagctgagggagggatgggcggtgacgcctgagagggcaacacattccctcctcaatgccttccccactgcccccagacaaccacaacatgctgcaggaggaagacttgatagatgaagacgacattcttgtgcgcacctccttcccagagaactggctctggagagtggaacctgtagacagctccaaactgtgagggcctggcatgcctgatcttgcctctgggctgggtctggggagagtgacaaggctgtgagcaacagggcttctctgcattccccccgaccctcccacaggttgacagtgtggcttcctgattctatgaccacatgggagattcatggtgtgagcctgtccaaaagcaaaggtgaggcggtgctgtccagacgtcttctcatccctccatgctctgaccctccctctgctctctgcatggatctggggaaaatcttcactggcttgcctgcaggcaagagcagagggcagtcattccagaacccttcctccccgaggcctgaggtccatctctgtcactgccccatctccctgtccacaggtctgtgtgtagccaagccaactcgtgttcgagtgttcagaaaattccacctgcacctgcgcctgcccatctccatccgccgctttgagcagtttgaattacggcctgttctttacaactatctgaatgatgatgtggctgtgagaccgtaggggagcctgagcatccagggtgggcatagggaggggtgcaaacagggacaggtcaggtcaggcagtggacctgatccaattaggaatctctggccatccctgtttcctgtccccaggtgagtgtccatgtgaccccagttgaggggctgtgcctggctggtggtggaatgatggcccagcaggtgacagtgccagcaggttctgcccggcctgtggccttctctgtggtacccacagctgctgccaacgtgcccctgaaggtggtggctcgaggggtttttgatttaggggatgctgtgtctaagattctccaaattgaggtgagtgactgcctggaaatctagccaccccgccccccggactcccagccatttaacattctactggccaggccatgtctctgcactcaaacccagtgtatggataaacttacaatccactattgtgactcaattgtgtcccagaaattgtttacttatattgagacagaggctagcccaggctgtagtccaggctggccttgaacattcagtaatccccctgcctttgcctttggaattactagtctacaggcaccactgtcacacctagccggctgtctctgaaacggtttgttctgttttatgttatttttgtggtcatggaggttaagtccaggaccttgtacatggtagagaagtgagctgagtccctgtttctgactgggaagttcacatgccaagaccctggggtgttcacccagaggggaggctgtagccctggctaatcccccactgtattttccaattgagacagaaggaaggagccatccacagagaagagttagtctacaacctcgaccccctaagtgagtatcccctgccccagccaccagtaccctagtggagttatggggcacaggggctcacccaccagctcctttcctctgcctagataacctgggtcggactttggagattcctggcagctcggatcccaacatcgtccctgacggagacttcagcagcttagtcagggttacaggtgggtggctggtccagacctttttcacgagcccctgcattcacctgaagtccatggaccctgttatagtcttctggtgctgagtgcgtagacctagtctcatcttcaacttctctgtcctttagcctcggaacccttggagactatgggttctgaaggtgccttgtccccaggaggtgtggcctccctcctgaggcttccccagggctgtgcagagcaaaccatgatctatttggctcctaccctgactgcttccaactacctggacaggacagaacagtggagcaaactgtcccctgaaacaaaggaccatgctgtggatctgatccaaaaaggttctgggttaagggaaagcaggagtcagagccagggagggcatgaaaggcagccaggagcctagagagagaagctggggtcaagggtaaggcgctgggagtacagccctggcccaaacagctggagagtaggaaccttggcacctcttttttcccaggatacatgaggatccagcagtttcggaagaatgatggctcctttggggcttggttacaccgggacagcagcacctggtgaggctggggactctgttcagggcagccagaggtcaaaaagcaaccagccaggtctcctgagagactagcattttctccagccacgccccctccgctctaggctgactgccttcgtgctgaagattctgagtttggcccaggaacaggtgggcaactccccggagaagctgcaggagacggctagctggctgctggcccagcagctgggtgatggctccttccacgacccatgtccagtcatccacagagcaatgcaggtgtgaacacgctggaggcacgtgtaggatgtcagcaggaagacgggctcctcacaactctggcctgacagcctctctttctctctcctcactaggggggcttggtggggtctgacgagacagtggcactgaccgcctttgtggtcattgcccttcaccatgggttggacgtcttccaggatgacgatgcgaagcagctgaagaacagagtggtaaggaagccgtgctctgtccttcctgcccggccatccttgccccgggagcccgggcatgcaggctcaggcctctgctctcttctaggaagcctccatcaccaaggcaaactcattcttggggcagaaggcaagtgctgggctcctgggtgcccatgccgccgccatcacagcctatgcccttacgctgaccaaggcctcggaggacctgcggaatgttgcccacaacagcctgatggccatggctgaggaaacagggggtgagggcgagggcaccctggcagagcacctgggacttggggccctcggattgcctgaaaagggctgaagagaaggggcctctcatggctgtggagtggaagcagggggctgctgacagggggcgccaagatcctggtggctcagctcatcacctgtagttttcttgttcagtatgcatttctctcccttctagaacacctctactggggcttagtccttggctctcaggacaaagttgtgttgcgccccacagccccccgtagccctacagaacctgtgccccaggccccagccttgtggatcgaaaccacagcctatgccctgctccacctgcttctgcgggagggaaagggaaaaatggctgacaaggctgcatcctggctcacccaccagggaagcttccatggggcattccgcagtacccaggtaggggcagccacagggcttgctcagggtgggtggttggttctgagaccaagtgtccgactcccaccctaacctcctcaggacactgtggtcaccctggatgccctgtctgcctactggatcgcttcgcacaccactgaggagaaagcactgaacgtgacgctcagctccatgggccgcaatgggcttaagacccacgggctacacttgaacaaccaccaagtcaagggcctggaggaggagctaaaggtgacctcctccatccctgatggggttgctggggtattgggcccaggtcagaagcctctgtccaatgcccagtccagccctctcctgagggtgtggtggggagactgactttcttctggctgtgtggtcaaacctctgggctcttcttccttcatctgtaaacagggtgtctatagagtccacaccagggtctaggtcagtggttctcagcctcagaacgctgtgaccctttagtacagatcctcatgttgtggggaccccaaccatgaatatatttcattgttacttgatgaccctaattctgctagttatgaattgtaatatctgacatgcaggatatctgatacacaactcccaaagggtcacaggttgggaaccgctggtctagttgttctggagattgacactgtagccaagcacaagtttctgtgtgtggggctactactggtctgctcccctgtgccatctgacctgctgcctctccctcctggcagttctccctgggcagcacaatcagtgtcaaggtggaaggaaacagcaaaggcaccttgaaggtgacaggagaggggtgcatgggtggggaagggaggagggactttggtctgtgagagagagggtggaggggtagaggagtgaggggtactgggttgtggtgtgggttggggagctggggtggggtgggtgcttgcaggatgtagggggcagtgtggggtaagggggtaaagtgtacaggggctttagtagggtgtagggaatggggaagggtggggcatgtagggtgaggttggggagttggacatggagtaccagggttgagtgaggtagggcagctaggtgagaagaggtggagtggaggtgtggggtgcaggggtaggcatgggcggtgggtggggtggggagctgggccttgactgggactttgtggcatagcatgtgtgttggggaggaggaggccatctcctggcttggtgtcccctgttccttccctgagcctccatctttgctctagtctggtttccctccatttctgggtgtctgtcgtctccttcagctccatcccgagtacctcagacctaggtccccatgagctcccctcctcccccgtttcttcctttatgtctcacttgacccagggcacccatagatgtcttggtagctccctcctctggcccaggcaactcttgcctcctgtcacactaaccctctgatcactgccagcatggcagtgaggctgacagcctggggaaatgtgccccttccaaaatgaagtggagtcaggaggatcagtggcccaaagtcatctttgctgtgcccagtgtgagcccaggctatgagagaagccaggagcaggcagctttctggcaggctgggctctcagggcagccccacacctcactgcagctgcatctcaccccttgcctcatgtgctgctattcactgggattggggatggggcaagggaggagctgggaccttagatccttcagcccaggcaccccttcaagtctgtgccatatgtgtcctgtgttctctccccctctctgactgaggcagatccttcgtacctacaatgtcctggacatgaagaacaccacatgccaggaccttcagatagaagtgaaggtcacaggcgctgtggaatacgcatgtaagccctggggtcagggggccttgactgacccctgtaggggggtctgacaggggcttctgcctcctcaccactgtactacacaggggatgccaatgaagactacgaagactactatgacatgccagccgcagatgaccccagcgtccccttgcagcctgtcacgcccctgcagctttttgagggtcgtaggagccgccgcaggagggaggcccccaaggtggtcgaagagcaggagtccagagttcagtacactgtgtgtatctggtgagtgcagagagctctggggagaatggtggtgggaagaggcggggtgtggcacagtctgagaatctatacatctggcttctcctcccactaggcgaaatggcaagctggggctgtctggcatggccatcgcagacatcaccctcctaagtggattccacgccctgagggctgacctggagaaggtacagtcacccatagacacctctccatcctttggagcccacctccctttttgtagcaaccccaagtgtcgaacccagtcacacaatgaccagggtccctgacctgtggctacctcctctttcctgcagctgacctctctctctgaccgttacgtgagtcactttgagactgacgggccccatgtcctgttgtactttgactcggtgagtaaagagaagtttcacaggaggggacactgggtttttgagtctgtatgataagggtcacatgtggcaggtggccttagagaactcacagcttctcccacatgtcaccatgaggccggggctgtgacctcagcttagcaaggtttatggagagtcacggagaggtggagtccaccgtggacactcactgggagactctgagggcctgctcgggcacctgctcctgggaaaggagggagcaggggaggcaggactgattcagagtctgacccacatcatggagggtttcacaggaagtgcctgtagcacacagaggtcctgggacaaggtctccctattggcagtgaagtcatcagaggccttggggaccagattttagagtctagtggcagagaagtgacagcatgaatgatcctggagacaaggccatggcgagcagtccaaggcaaggcattgaaggcagccctggcttggccctgagcaggcttccatcttccatcctggggccaggtccctaccacccgggagtgtgtgggcttcggagcctcgcaggaggtggttgtgggactggtgcagccatccagtgctgtcctgtatgactactacagccctggtgagcacttgggatgctttggcaagcaaaattgcggggggtggggggggcggagggtttgccctctcatctgggacaccacggagtgggggaggcctgggctccaagaggccctcatgtcttgccgcctttctctagatcacaagtgctctgtgttttatgctgcacccaccaagagccagctcctggccacactgtgctctggagatgtatgccagtgcgctgagggtgagaggagacccaggtcgggggccaaggggattggctgggagggcgagctggtctcatgtgacaccttcctgcagggaagtgccctcgactgctaaggtcactggagcgaagggtggaggacaaggacggctaccggatgaggttcgcctgctattatccccgagtggagtatggtcagtccctcctcggcctctattctccttggcatgggctccttgtgctcttggggttgcctgctcttcccccaaccccacctgtggcctccctgctttgccctgactgcctcccccttccctgtccctcccaggcttcacggttaaggttcttcgagaagatggcagagctgccttccgtctctttgagtccaagatcacccaagtcctgcatttcagtaggaaggaggaatgggcagacaagcaggctagggagtggtggaggctgaggtctgggtgtggggcctcttggaaatgggaaatctcaatgtctgaatatgacccccaccatcctgttgtctccccagcccctgttcattaggaacctgggcttgctcatagtgagcaacaagttctgtaggaagcaacgtggcttaaacagcaggatctacacagagtcctgcccaaggtttctcctggccctttcttttcctctgatggctccatctctttattccctcaggaaaggacaccatggcctccataggtcagacccgcaacttcctgagccgggcctcttgccgccttcgtttggagcctaacaaagagtacttgatcatggggatggacggggaaaccagtgacaacaagggagagtgagtcccccagtccctcccttgctctcctcatacctgtgaccttccttttggggacagatcctaggcacctagctctgcctctccaaagccaaacgccttgagtacatgtcctgaccctactatgtcacctgcagcccccagtacttgctggactcaaatacctggattgaggagatgccttcagaacaaatgtgcaagagcacccgccatcgggcagcctgtttccagctcaaagacttcctgatggagttcagcagccgggggtgccaggtgtgaggccttaggactctggctctctgagctcagctcagggttagggcctcactggattagaggctctgctctacagggtaaataaaagaaaagctttttgacagccaaa

SEQ ID NO: 3 - DNA, 20658 bp, Homo sapiens
  source 1..20658: mol_type = other DNA
agagtcaactctgccccgaggcctagcttggccagaaggtagcagacagacagacggatctaacctctcttggatcctccagccatgaggctgctctgggggctgatctgggcatccagcttcttcaccttatctctgcagaagcccaggtcctggaggcgggatgctgggtgcttggattggggcagggctggcatcgggacccgattcaggagtgagggagagcaggggtggaggtgtcagagcgaagtctgactgctgatcctgtctgttctccccaggttgctcttgttctctccttctgtggttcatctgggggtccccctatcggtgggggtgcagctccaggatgtgccccgaggacaggtagtgaaaggatcagtgttcctgagaaacccatctcgtaataatgtcccctgctccccaaaggtggacttcacccttagctcagaaagagacttcgcactcctcagtctccaggtaaccagaccccatgccctcctgctgcttgtgggggcctcctgccctgttcccatctgtcttgtaagtgtcatcatcttcccactggcctcctcccctcctgtcttcccaccctggcattctccttccacgtttctcccttggtctctgtcctttttggtcagctgtctcttgctctgtgacccgctccctctccctctccctctcctgacaggtgcccttgaaagatgcgaagagctgtggcctccatcaactcctcagaggccctgaggtccagctggtggcccattcgccatggctaaaggactctctgtccagaacgacaaacatccagggtatcaacctgctcttctcctctcgccgggggcacctctttttgcagacggaccagcccatttacaaccctggccagcggggtgagtctcagccccagggcctcaacctttaaccccctccgagccctctcaggatgagtttggtgccccctaagtgagataacctgaaagaaagtgccacacagaaggggtgcttaggaaacatttgtcccctgctccctctgtggagtttgacccaccctccccttgcacatggacccctgctcacctctctcctcctccactcccagttcggtaccgggtctttgctctggatcagaagatgcgcccgagcactgacaccatcacagtcatggtggaggtgagtccccgacctctggccttcctgatcctggccactgatgtgacctcctgcctgtgagcacttctccccttgcagaactctcacggcctccgcgtgcggaagaaggaggtgtacatgccctcgtccatcttccaggatgactttgtgatcccagacatctcagagtgagcgctcccaatgtgggggctgcccccaagctacaccaccccaattcctgttaggctctccacctcccacacagaggcacgtccccagatgccctgaccctcagcctcctgagcctctggttaacccccacagtcctcttcccagggaagcaggctgctggctctccgtgccccactgtacagatgggctgagccccttccttgtccattctcaggccagggacctggaagatctcagcccgattctcagatggcctggaatccaacagcagcacccagtttgaggtgaagaaatatggtgagagctggaaactggagggacaggcagctgctttcctgaaggaaataagggtggaaggagaggtactgggagcagctcagggcagggagatatgggtgccacagccctgagcagaggggagtctttgagctggagtctgacctgcctatcccttcaccctgggtcagtccttcccaactttgaggtgaagatcacccctggaaagccctacatcctgacggtgccaggccatcttgatgaaatgcagttagacatccaggccaggtaatacctccctccccacctctgcccaccagcaccgggtcctgctccctactcagtatgaatgggctcctgcttccctgccctcgggccattattccccccagcccttggcccaccctcttctctctgccacgacaggtacatctatgggaagccagtgcagggggtggcatatgtgcgctttgggctcctagatgaggatggtaagaagactttctttcgggggctggagagtcagaccaaggtaggaaggagaataggggctggggaggggaaggggcaagggaggtgaggtgggagactcagtctcaccctatgtcctgtttctttctatgccccagctggtgaatggacagagccacatttccctctcaaaggcagagttccaggacgccctggagaagctgaatatgggcattactgacctccaggggctgcgcctctacgttgctgcagccatcattgagtctccaggtgggtgactttcccttattgtaaccccagacccttgcctctgacctctgagctaaccctctgtcctccggcaccaacaccaccccacttctcacatctcatctcagactcaaaaccaggaaacacccaggagacctggtttctctccaactctgtctctgtgactcggcccttttccctggctgagtttatttatttctttgctcgttctgctcattccttcactcctccagtggacatgtgttgttcaatgccccgtgctaggcctcagcatgcacagacatgttggggaccagcctcaacgccacccgtagggttcctgaagtccattggtgacacaggaatgagaagagacaggttaagagttcataaagagtgggggccagggggccaattgcaaaatggaggctgcaaaaggctcagagctctggtctccacactattttttgagtacagtcactcagatctaagaagcagatgttcagggagaaacagtgaaagggaggcagtgggtcataggcgtaatctatagcaatagagttttaaatgaatctcctttgtgctcaaacagcatgtctttaaattatcggagagtagctggtggaagtgggcttagctagaagactgcatgtctgtccaatgcttcaaaggagggtctttctccttgaacagagtgtttacagataagacagggggtctcactctgagcatgggaacatgatggcaattaggaggcttttcttctcagaggcctcttgtggctttccacaacttattgtctcatatttttatggacagtttatacaggcaccccacaagtccttttcccaacatgcccccctccctttttttttttttaaccgctattgctattatggcttatttgtggtgtttggtctgttttcagaagtgtcttttgcatctgtagactaaaagtaaacagcataaacagatacacattaaagtaaaatttgtaatagttgatcctttaatggtcttaatctgtttaagaggatttatgtttgaaagtccgtcagtagctccaatgagaatgtcagtctcaggcaggagggttaaatgagcctgagatgctttaaaaacctgtttttttaaaatttggttatatttaatgttaaatttttatttttttcttttagatgatgtctaactttttaaaaatgatgtttagtagtattatacgaatggggagttatgtagaaattggaagtatttcaattacattgtacttctaattgatgttttaagtttattgtacgatcttccatttaaataacagtctgtctaagatcatttgtttgatttgtcaattgttggtctatttgggtctgagaattccacaattttgaggaattttttgttaactatttatatattttgtagtttgaacagaggagtgtaaagcaattccagcagccgcagcagtagctgtgactgcaataaggcccataagactgttataagggtaaaaataaatctctttgttttggtaaacacttttttttaaaacatttttgtgacaatatgaatggaaggagaggctttctaaggtctattgagggaaaccagtatccaaactcctttcttagtttttatcagtaacacagatgtttttacaccgaacgtggaattaatacaggtgaaaaggtgacagttttgacaagtaatagtttgagaattaggtcgaatgtcaatatttttgaccattaacataaaaggagggttgacacaactctgaatgggcactgttttgttggaagaaaactgatacgcaaattgaagtttttaaccttttttttttaaagataatatatttttttctaaacttaaatatgagattgggccattattaactttcataatttggagtgtttagggcctattattggattaattattttgggatgtgggccagctgtactaaaattggtccaaattatgggaaaatgagcacgtttttcagtgtaagtagtgttacctttttgatagtatagtttctgttttagttttgtcttgtatttattattttgatgggtacaattaactgtaaaggtcccctcaggggaccaattaatgacaatttcataggaattattttgtagtaccatagtgtgatcagagatgtaattttttttaattaatatttttaaattatttgaccattgttaaggttgttggcacctcttttttgggggcttaaactgttaattgaattgaactctgtgaatgatccgggctccatccagaaaataaatgataggatactggtctttgattatgacctggaattttaactagtcaatgttgtcggtagccttttaggcaaccgatagttggccttatgtaaagaggggggaactgataacctatggacacatttattaacttttttttttttcctttgggtgagagggcccatgagtatttgtaggcttagggatccaaacgctattattaacataaacttcaactgggggttttaaccatgtgacaggcctaattaaaggcaggaatgggacacatgcccaataggtataattttgggctgttgtagccacaggtttgttaggcgaggaggtcactgtttttattttggctttgtattctaggattagtaaataacagaagacaaacatgagtataattagtaacttttttttttagtaaaagagtgacctgtagtgttacttggcatcttagtttactatatgttattaatgaggaaccccactgggggtatgttaatttattctagctaagcagttatgttattagaagctgagaagggggtgtttgttaaagtaacagggcagaagaaaggcggatttaagatacgagcttaatacagtgtagcaggtataggtagtaggcaaagtgagagaattaaaaatgaataaattatttggcttagacttttgtttttttagtataatgtctgaggcctgtgttgtttgtggaagtcgcattgttgaggctgtagttcctgtagggtcttttttaggctggttcaaatgtttttttattttttaattttttatcctttgatgaggatgtagtctttaggctggtactggaaattttaggagtggcgtctgtgttaagagactttttacaatttttaaagagcaggttagtgttttaagaaaaacttgtgttttattttaatgtttagtttatagaaaactggatgatatctttttaactttagtaaatacgtttacacacggaattttttacaattatcattttaaaacttgtttagatctttaaaacaaaattaaacaaccttttttgtataaattttttataactttttttatgacttttacagacaatttttaacatgtcttaactttttatgttttataatttttttactaaaggtacatttttataactttttaaatttttttacttttttgtatttttttgatttttgtcttagtcttttttttacttttatttttttaaatgtgtaataattagatgagtgttggtaacaatggatgtatgtacatattttagtttttaaaatttagggatgtgtttaacatctgtttgccagaactgactaggttccaattctttacggttaacacctattgaaggagggtatgtgcctgtgagctggtaatctgggcattgtgggataatttgtttagccagcctctgtgtaagttgaaattatttagataagtttctccaattttggtggaataatcgatgtgattgggtggcttggtcaagcagtgatgtcataacctgaaggtctgcttgattattgccgtaagccaatgggccaggcagagagctgtgggctcgaatgtgtgtaataaaagtaggatgtgtaccttggtctagtaattgttgaagttgaagaaaaagaccacacagagtgggctccagagcaaacttaaggctgtaatagtttttaaataaatacacagaataaccttagctctctgaatgttagtaaattcagatcaagtgattggattatgtggtctccaccagactgttgctttttcatgtttaccagacccaccagtaaaaacagctatggctccttccaaaggggcatcacaagtaatttttggaagaacctatgtagttaattttaagaattgaaaagtttttaggataatgattattaatacatccaacaaattttgttaaattaatctgtcatgtaactgagttaataaatgcctgtttaacctgatttttatttattggaactataatttttattgggctcagtgccacaaaatttaataattcatatatgagcctgtccaattagaattgccatctgatttaagtatactgtaagtgcttttatggtattatgtggcaaaaaggaccatttaactaaatcatcattttgaacaataacccccattattgtgtggttagtgtgaagtagggaacacaatgaattataaaggcaagtctgagtcaatcctactgacctgggcttgctgaattttgttttcaattactgataactctttcatggcctcgggtgttagttctctgttactgcgtaagttggtatttcccctcaatattgagaagagattagacatagcataagtaggaattgctaaattgggccaaatccaattaatatcttctaacaatttttgaaaattatttaaggttttgaaagaatctcttctaatttgaaccttttgaggcttaatggctctatcctgtacttgtattttcaaatactgaaaaggagtggttgtttgaattttgtcaggtgctataagtaattcagcatttgtaattgtcttttgcaaagattaataatattgaataagttggtctctactttttgctgcacaaatctggaaactgatctctaacaggctggatagttctgcctacaaaagtttgacaaactgtgggactatttaacataccctggggcaaaactttccaatgatatttggctgcaggttttttgttattaacggcaggaatggtaaaggcaaattttttgaaatctgcctctgctaaaggaattgtaaaaaagcagtcttttaaatctataataacaagcggtcagtctttagggagcacagtgggggatgggagcccaggttgtaaggctcccatcggttgaattacagcgttgacgccatctaccggactttttcttaattacaaatactggggaattccaaggagagaaagtgggtgaaatatatcctttttttagtagtttattttataaagcacccccaacttttccttagggagcggccactgttcaacccagacggggcgccgggtcatccattttaagggaaattgctccttcactgtaataactgtagggtgaacctgaattgccccatctccataatgaactgtgggtcgggcaataatgggcacggtgagccaagtctcgggctccctccccctgcacccactcggctgaggaggaggtggccattctggacatttctctacaggaaccgtgggctgaacaattttttgagtaggtttagggagactggggagattggcataaatcatcttcagactctcctttttgttagtactcggtagaggtggttcagagttctgattatcaaactcctctctctcctcctctgactcagcctcattatctgtctgaaaaggctccagtgctgcatgcaccaatgaccaaagcgaccaaacaggcaaaggaatttcctttccttctctatatgctcttttaaggtcctttccaactccttcttaatgttttaatttcaaagtttcctgttttgggaaccaagggcaaaattgttccatagcatgaaacaaatccataagattttccgtatcaacttttaccccaccatgcatgcttgaagagctgccgtaggaagctcaaatacgtggtgtacttactttcagtttttcccattgtgtccctagctttctctgggcgccccgcttacctgtagaggttaaaacttttatgtccttgggagtcctttgttcgttggtcctctgtttcacatgcttgagcgtttcctcaccagattcttttgggccccacgttgggcgccagaatgttggggaccagcctcaacaccacctgtagggtacctgaagtctggtggtgacaaaggaatgagaagagacaggttaagagttcataaagagtggaggccagggggccaattgcaaaatggaggctgcaaaaggctcagagctctggtctccacactatttattgagtacaataacttagatctaagaagcagatgttcagggcaaaacagtgaaagggtagcagtgcgtcacaggcataatctacagcagaagcgctttaaatgaatctcctttgtgctcaaacagcatatctttaacttatcggagagtagctagtgggagtgggcttaactaggagcctgcacgtctgtccacattccaatgcttcaaaggagggtctttctccttgaatacagtgtttacagataagagagagcaggtctcgctctgagcatggcaattaggaggcttttctcctcagaggcctcttgtggctttccacaacttattgtcccatatttttatggccagtttatacaggcaccccacaagtccttttcccaacacagacaggaatacggcagcctgtgccctgggagctcactgtcttgtgggagggaaccactcaagccactccccacttgtcctcctgtccctctcttcttgggctctgtcccccacctctctctgtcctttgtcttgcaggtggggagatggaggaggcagagctcacatcctggtattttgtgtcatctcccttctccttggatcttagcaagaccaagcgacaccttgtgcctggggcccccttcctgctgcaggtttcttccagaggggaaggatgagtagggaggatgtggtagttaggagggctcagggtctgaccactctcttttgcctgccctcctttacctgcctaggccttggtccgtgagatgtcaggctccccagcttctggcattcctgtcaaagtttctgccacggtgtcttctcctgggtctgttcctgaagtccaggacattcagcaaaacacagacgggagcggccaagtcagcattccaataattatccctcagaccatctcagagctgcagctctcagtaggactcctcggacccctgggagatggtgggggaaggggaggagggtgagctggggtcccaaggatccatggcctgacttggggggaaggtggggtacttggctctgagctactaccctattcgcacctgaccccctctccaggtatctgcaggctccccacatccagcgatagccaggctcactgtggcagccccaccttcaggaggccccgggtttctgtctattgagcggccggattctcgacctcctcgtgttggggacactctgaacctgaacttgcgagccgtgggcagtggggccaccttttctcattactactacatggtgtgcatgagctggggagtcacggagggctggggtgcagggaagagccctctgggtggggctgggggggttcaaggctgaggctgtcccatgaagaggcaaccactcttgtccctcccattcttggcccagatcctatcccgagggcagatcgtgttcatgaatcgagagcccaagaggaccctgacctcggtctcggtgtttgtggaccatcacctggcaccctccttctactttgtggccttctactaccatggagaccacccagtggccaactccctgcgagtggatgtccaggctggggcctgcgagggcaaggtgaccggggtcaggagagatggcacttgtgccgagggggttgaggacagggtgattgccaacagggcatggatttagcttgggggcagtgaggataccgggactgaaggaagctctcccactctgaccgcccccacctgccgcccctgccagctggagctcagcgtggacggtgccaagcagtaccggaacggggagtccgtgaagctccacttagaaaccgactccctagccctggtggcgctgggagccttggacacagctctgtatgctgcaggcagcaagtcccacaagcccctcaacatgggcaaggtttgtccagaccctctccacagctctctcacccctccatggctcatccccctgcttccctgagccttgggcgcagcccctggatcccactgaggctccccacagtctcttccccacttggccctgtggtctccatctcctggctctgtatcctttcctatccccccatgtgctgccctctcacctgtgccgagtgctcagtcctgcccctcagccacacttggctcctagcattcctgcctttcttgcaggtctttgaagctatgaacagctatgacctcggctgtggtcctgggggtggggacagtgcccttcaggtgttccaggcagcgggcctggccttttctgatggagaccagtggaccttatccagaaagagtgagaacagagaaggaaggggagtgggtggcgggaagataaggaaggaggaagggcctgaggggaccagctggaagagtccgggcaggaagggctgggcaggggaaggggaggaggggaggaggccgagtgcctgacggctggactgcagcctttctctctaccaggactaagctgtcccaaggagaagacaacccggaaaaagagaaacgtgaacttccaaaaggcgattaatgagaaatgtgagttgcgggtgcctaggcagtagcttgggctctccacctgggatccgggttgggggtctgcctctctgcccctcggctccttgctgaacccacgtgtggtatttggggccagagatccgaattccgggattacgagtggaaggtgggcagctctctccagcagcctctcttatgttgctggtctcaaggggtcggggcgggggctgaggtgtatgtcctttttgtcctctcatgctcacccccacctggccctgcagtgggtcagtatgcttccccgacagccaagcgctgctgccaggatggggtgacacgtctgcccatgatgcgttcctgcgagcagcgggcagcccgcgtgcagcagccggactgccgggagcccttcctgtcctgctgccaatttgctgagagtctgcgcaagaagagcagggacaagggccaggcgggcctccaacgaggtgaggggctgggtggggctagggcacaggtggcggcgcttggaaaggcagaacggtcccctcctcactcccgtccaccgtggtcccccagccctggagatcctgcaggaggaggacctgattgatgaggatgacattcccgtgcgcagcttcttcccagagaactggctctggagagtggaaacagtggaccgctttcaaatgtgagagtgtgtgccggcccggccttttctctgtgctgtgtctcggggccagccggggtagacgggccttctctgcctttccctacacagattgacactgtggctccccgactctctgaccacgtgggagatccatggcctgagcctgtccaaaaccaaaggtgatgtcaccctgtctgggcctcaggtgaccctgcttccatttccctgtaccccagctccctgttccctttgctcttagtgtaggaagagggtccagtgatctggggaggtctgtgccagcgtgcagctggcgtgggccagagggcagaggcggactgagacagagctgggtcacccccacccctccctcctgtggccctgaagctttgatggcccctctgatctctgcccctgtgcccacgcttcctttccctcaggcctatgtgtggccaccccagtccagctccgggtgttccgcgagttccacctgcacctccgcctgcccatgtctgtccgccgctttgagcagctggagctgcggcctgtcctctataactacctggataaaaacctgactgtgaggccccataggagcctgagcatacaggagttgggggagccagggcccagtgaggggtggggaggctaaccgggccaggactctggccatcctcgttttcctgccctcaggtgagcgtccacgtgtccccagtggaggggctgtgcctggctgggggcggagggctggcccagcaggtgctggtgcctgcgggctctgcccggcctgttgccttctctgtggtgcccacggcagccgccgctgtgtctctgaaggtggtggctcgagggtccttcgaattccctgtgggagatgcggtgtccaaggttctgcagattgaggtgaatggagcacccctgaatataagtccccgggcccccagctttgtcctccaccctcagcactctctctgctggccaggccaggggcccaacacccaaaccaatgccttggtctgttcccatcttctacaattctgatccaactctgtccctggagttgaaactcaaagttctgggggagtctgcgctagcagggcaggctgtagtcctgtgtgacctcacaaccatgttttccctgagacagaaggaaggggccatccatagagaggagctggtctatgaactcaaccccttgggtgagtgaccctctacctccagccattggtttcctaagtgggtacaggtggtgggggatgtggacagcaggacaggctgccaacttcccccatttccccagaccaccgaggccggaccttggaaatacctggcaactctgatcccaatatgatccctgatggggactttaacagctacgtcagggttacaggtgggagtgccctttagtcccttcccagtggccaccttcggattcatgtgggacttgtggatccctgcttggtcccactccccgtgagcctctgacacagagtcctcagacctccaccctctccctcccatgtagcctcagatccattggacactttaggctctgagggggccttgtcaccaggaggcgtggcctccctcttgaggcttcctcgaggctgtggggagcaaaccatgatctacttggctccgacactggctgcttcccgctacctggacaagacagagcagtggagcacactgcctcccgagaccaaggaccacgccgtggatctgatccagaaaggttctgggtgcaagggcaagcaggaggggggccaggaaaggacagttactggaagatggacagcccaggaggctacagagggaaagaaagggggcccctgatgaggatggggagcatggccttgggctcaaacagcagaagggtgagtgtcacctgagcggccacctctcctctccaaggctacatgcggatccagcagtttcggaaggcggatggttcctatgcggcttggttgtcacgggacagcagcacctggtgagcttgggagagtggttccagggttctgagggggtcagggctggggcaggggtgggacagagctggtatgatgggagggtggataaccaggcacctgggggcgtgggcataatgagaagcaagtccttatccccaaccctcctttcctgccctccaggctcacagcctttgtgttgaaggtcctgagtttggcccaggagcaggtaggaggctcgcctgagaaactgcaggagacatctaactggcttctgtcccagcagcaggctgacggctcgttccaggacccctgtccagtgttagacaggagcatgcaggtgcgggcatgctggggctggcccgagaagcgcctgtcggaggactctctttgccccttccccctcctgtttgacatcttttctccccttactaggggggtttggtgggcaatgatgagactgtggcactcacagcctttgtgaccatcgcccttcatcatgggctggccgtcttccaggatgagggtgcagagccattgaagcagagagtggtaagttcagtggcgtttctgccctctgctggcccccagctctctccctttttcctcaggaacccaggggtccaggcccaagaccctcctcccgttttcttccaggaagcctccatctcaaaggcaaactcatttttgggggagaaagcaagtgctgggctcctgggtgcccacgcagctgccatcacggcctatgccctgacactgaccaaggcgcctgtggacctgctcggtgttgcccacaacaacctcatggcaatggcccaggagactggaggtgaggggtgaggcgctcctggcagtgagcctgaggcccaggggaccttaggatccctgagtgtgcccagagggagaggctggatgaagactcagaggaggaatgaagttataagcaggggtgggttgggggagactcaggagagcccagcagggggtggctaagggccaggggaccaggctcttctccctgccttcctgtttactcgtggtctcccttcactttcagataacctgtactggggctcagtcactggttctcagagcaatgccgtgtcgcccaccccggctcctcgcaacccatccgaccccatgccccaggccccagccctgtggattgaaaccacagcctacgccctgctgcacctcctgcttcacgagggcaaagcagagatggcagaccaggcttcggcctggctcacccgtcagggcagcttccaagggggattccgcagtacccaagtaggggccgtccccgggctctggcgggggtgggtagtcctcagaccaagggcttgcttgagtcctggctcaacctccctaggacacggtgattgccctggatgccctgtctgcctactggattgcctcccacaccactgaggagaggggtctcaatgtgactctcagctccacaggccggaatgggttcaagtcccacgcgctgcagctgaacaaccgccagattcgcggcctggaggaggagctgcaggtgaaccactccctggtgaaccactccctcgcctgggtagccaggacacctgggcctcgtggccaggccagaagccgtccccaccctcccacccgtggaatccccgcagcacttcttcctggggtcttcgggggaagactgacttcctggctgtgtgacctggagctctgagcttcagttttctcacttgtagagtaacatacacagagttcaccctacagggtcgttagaaggctgaagtgagataattcatgtgctggtataaactttgtggaaatgtgaggtggggagaggaggtggggctgttttgaggaaggagataagttattggagccgcaaaaacaggtttgcttgtgcccttctaacatcgccttcccttttctgttgctgaagttttccttgggcagcaagatcaatgtgaaggtgggaggaaacagcaaaggaaccctgaaggtgagggccagggaaggggtggggccaggcactggtggaggagagggtgtggagtgagaggcctgtgggcagaggcacatggtccggggaaggaggcagacacctcagggttggtgtcccgtgcttccgtcctgggtgtttttccccctgcttgctttcgcttgctctccccatctctgggtacctgttgtttcctttacccgcctcagtgctggtggctccgaatcccactcctcagcccaggcctcttccctgaaccatgggccccactcgtcccactcccacagcacctcagacgaggcatgtcccaaagcccttcttcattctgtgtctcttgtctggctggtgggagcccctcccagccaggagcccagccactactctagaggccgtgttagtggcccctctcccaagcctgtccttatgtccctagtgactcctcctctgctcccctgctgcctgtggcccttggtgctgcatcctagattctgtgctgagacggccttctccctacctggaacttctctctacctcctgtctcccctgtctgatccactgtccacacggcagtgacactgaccttccaaaagccccagccagatcagccttggggaaaagtcactccccgctgcccacggctcagatggctgggcctctgcccacccctccggccagacagctctccttgtctacacagatccccttgcctttcctgtccttccctgcttcttggcccacaggacaagctctttcttctccttcaagccttggccagaagcctttcctgagcttttcagtccagcctcttcccagcacagtctggagtgttggcctctgggggcaggcccctgcttctttacctctctgtctcgcctgacgcctgtggcgaatgtggtgccactcgtgtgtgtggactgtgcagtgacggggaggaaaaggggctgaaggcctcaaatcctgtagcccagggagatgcccttaggtatggcaccagagaggtctgtggcctcacatgtcccacgtcctctccctgccccttgctgagccaggtccttcgtacctacaatgtcctggacatgaagaacacgacctgccaggacctacagatagaagtgacagtcaaaggccacgtcgagtacacgagtgagtgtgggggttgggaggccttggggccaggcaggggctggcgcagggagccgggtggccatcccagccctcctcacaatgcttccctgtgcagtggaagcaaacgaggactatgaggactatgagtacgatgagcttccagccaaggatgacccagatgcccctctgcagcccgtgacacccctgcagctgtttgagggtcggaggaaccgccgcaggagggaggcgcccaaggtggtggaggagcaggagtccagggtgcactacaccgtgtgcatctggtgggcgccgggagctgccctgggccaggggagggagggcaggacccaggctggggctgggcttctggagcccgcgcaggcagaacctggacgacagctcacacgtctccacaggcggaacggcaaggtggggctgtctggcatggccatcgcggacgtcaccctcctgagtggattccacgccctgcgtgctgacctggagaaggtgtggtcagccacccagggcaaccccctctgtcccaggtactgagccctgtcatgtgcagggcctgtgaccaactccccttttccacagctgacctccctctctgaccgttacgtgagtcactttgagaccgaggggccccacgtcctgctgtattttgactcggtgagtggggagagatgaggcaggaagggactcgatggcaccgggtttactgagtatgcgttaggaggtttctcaggagacagctgtgtcagcggctggtgctcttgagaacttgtgatgtcatcagagagaaggacaagaatgtgagcccgtgagacacagcagagtaaggggcagacctgcaggcggcagggaccgatgccagtcagcagggaccctcagggtttgagagggagtctttcctaatgctggttttattcagcttgaggggctgcctttgtttttttgttgaacttcctatcttttttttaatattaaagcgtattttcctttacaaagtgatggtggccatagatgatagttgtatttgtcttttcacgaccttatttggctaaaatagttatcaaccctcttacggctctcaaaacatttttatttatttatttagtaaagacagggtctcgctctgttgcccaggctggtcttgaactcccggcctcaagcgatcctctggcctaggcctttcaaagtaccggatttacaggccagagccaccatgcccggccttcaaaaaaagttttggaacatttactgtaacctctgggagaaaatgtgagaaaggtgtggtggctgtcattagccagctgtttgtaggtcagggagacccctacccagtgtgtgcagaggggccagcccccatcagctggggaagcctggctgacacatctgggttgaacacaatagaaaacacagagccaacaagattcccggatagggagctgacggtgcagcagcctagctcaggagggacactggcacggcaccgtgtggactgggcccgcgtgggcacgaggaggggtcaggcctgggacctgagtcggggggtcaggcaggatgacagaacctgcagttaggttgtggcaaataaaggaggacccagttgtatccatgacaaagatgaggccgcgaggagggcgagtgggtttgggggcaggcagagtgccttggagaacttacaggtcctgccacaatcctaatgcaaggatggagctgcaagttcagtttgggaatcatcagcctggattggtttggtggaagccagggagtggttgagacccccacaggggagctctgaggaaggaagttccgaaggagggaacgtaagaaatgaccaggtcagaaccaagggtggtccagaagctaacccttagcttagggacagtttcacagagaacacgtccatgatgcaagactctgctgagggcctggagcagtgaagactggggcaaggtcaccctctgggaagtgaagtcaccagagaccttgcggagcagctttgagagttctctgagtaggaaggtaacagaatgtgaaggacactggagagaaggccaataggaagcaaacaaaaacaggccaaggaaacccagtacagggggctgcagggcccagggagtgggtccctcatctctcctccccacgcttggccaggtccccacctcccgggagtgcgtgggctttgaggctgtgcaggaagtgccggtggggctggtgcagccggccagcgcaaccctgtacgactactacaaccccggtgagcactgcaggacaccctgaaattcaggagaactttggcataggtgccctcctatgggacaatggacaccggggtagtgagggggcagagagccctggggctccctgggactgaggaggcagaatggaggggcctgtgccctaactcctctctgttctccagagcgcagatgttctgtgttttacggggcaccaagtaagagcagactcttggccaccttgtgttctgctgaagtctgccagtgtgctgagggtgagactgagggcctggggcggggcagtggaggcgggatggccggggccccccccacactgtctgatgggttccccaacttcagggaagtgccctcgccagcgtcgcgccctggagcggggtctgcaggacgaggatggctacaggatgaagtttgcctgctactacccccgtgtggagtacggtcagtcttcccaccgaggccctggcctgaccctccctcggggaccggccgttttggtctctctgggtgtagcctgctcctcttacaggtcatgcacgcagcctgtttgctctgacaccaacttcctaccctctcagcctcaaagtaactcacctttcccccttctcctcaccccctcttaggcttccaggttaaggttctccgagaagacagcagagctgctttccgcctctttgagaccaagatcacccaagtcctgcacttcagtatgaagcaaaccggagaggcgggcagggctggggggagacagggaggctgaggtgtggccgaggacctgaccatctggaagtgtgaaaatccccttgggctgtcagaagccttgggcttggccataaatagggaggcagtggcacctctccatgggggtggcgaaggtggaatgagaggatctacacagagtccccagcctgggctcaccctgcaccttctcttcccctctgaccacttttgcgcacgtcatccccgcagccaaggatgtcaaggccgctgctaatcagatgcgcaacttcctggttcgagcctcctgccgccttcgcttggaacctgggaaagaatatttgatcatgggtctggatggggccacctatgacctcgagggacagtgagtcatctggtcccctcagtctcttgtcctccccatgcctcgccacctaggccttgcccctcagaagccagatgcctgtgctctccgtttccacctgccatcctcccgagccctgctgactgcccctttgccccctgcagcccccagtacctgctggactcgaatagctggatcgaggagatgccctctgaacgcctgtgccggagcacccgccagcgggcagcctgtgcccagctcaacgacttcctccaggagtatggcactcaggggtgccaggtgtgagggctgccctcccacctccgctgggaggaacctgaacctgggaaccatgaagctggaagcactgctgtgtccgctttcatgaacacagcctgggaccagggcatattaaaggcttttggcagcaaagtgtcagtgttggca

SEQ ID NO: 4 - DNA, 20624 bp, Homo sapiens
  source 1..20624: mol_type = other DNA
agaaggtagcagacagacagacggatctaacctctcttggatcctccagccatgaggctgctctgggggctgatctgggcatccagcttcttcaccttatctctgcagaagcccaggtcctggaggcgggatgctgggtgcttggattggggcagggctggcatcgggacccgattcaggagtgagggagagcaggggtggaggtgtcagagcgaagtctgactgctgatcctgtctgttctccccaggttgctcttgttctctccttctgtggttcatctgggggtccccctatcggtgggggtgcagctccaggatgtgccccgaggacaggtagtgaaaggatcagtgttcctgagaaacccatctcgtaataatgtcccctgctccccaaaggtggacttcacccttagctcagaaagagacttcgcactcctcagtctccaggtaaccagaccccatgccctcctgctgcttgtgggggcctcctgccctgttcccatctgtcttgtaagtgtcatcatcttcccactggcctcctcccctcctgtcttcccaccctggcattctccttccacgtttctcccttggtctctgtcctttttggtcagctgtctcttgctctgtgacccgctccctctccctctccctctcctgacaggtgcccttgaaagatgcgaagagctgtggcctccatcaactcctcagaggccctgaggtccagctggtggcccattcgccatggctaaaggactctctgtccagaacgacaaacatccagggtatcaacctgctcttctcctctcgccgggggcacctctttttgcagacggaccagcccatttacaaccctggccagcggggtgagtctcagccccagggcctcaacctttaaccccctccgagccctctcaggatgagtttggtgccccctaagtgagataacctgaaagaaagtgccacacagaaggggtgcttaggaaacatttgtcccctgctccctctgtggagtttgacccaccctccccttgcacatggacccctgctcacctctctcctcctccactcccagttcggtaccgggtctttgctctggatcagaagatgcgcccgagcactgacaccatcacagtcatggtggaggtgagtccccgacctctggccttcctgatcctggccactgatgtgacctcctgcctgtgagcacttctccccttgcagaactctcacggcctccgcgtgcggaagaaggaggtgtacatgccctcgtccatcttccaggatgactttgtgatcccagacatctcagagtgagcgctcccaatgtgggggctgcccccaagctacaccaccccaattcctgttaggctctccacctcccacacagaggcacgtccccagatgccctgaccctcagcctcctgagcctctggttaacccccacagtcctcttcccagggaagcaggctgctggctctccgtgccccactgtacagatgggctgagccccttccttgtccattctcaggccagggacctggaagatctcagcccgattctcagatggcctggaatccaacagcagcacccagtttgaggtgaagaaatatggtgagagctggaaactggagggacaggcagctgctttcctgaaggaaataagggtggaaggagaggtactgggagcagctcagggcagggagatatgggtgccacagccctgagcagaggggagtctttgagctggagtctgacctgcctatcccttcaccctgggtcagtccttcccaactttgaggtgaagatcacccctggaaagccctacatcctgacggtgccaggccatcttgatgaaatgcagttagacatccaggccaggtaatacctccctccccacctctgcccaccagcaccgggtcctgctccctactcagtatgaatgggctcctgcttccctgccctcgggccattattccccccagcccttggcccaccctcttctctctgccacgacaggtacatctatgggaagccagtgcagggggtggcatatgtgcgctttgggctcctagatgaggatggtaagaagactttctttcgggggctggagagtcagaccaaggtaggaaggagaataggggctggggaggggaaggggcaagggaggtgaggtgggagactcagtctcaccctatgtcctgtttctttctatgccccagctggtgaatggacagagccacatttccctctcaaaggcagagttccaggacgccctggagaagctgaatatgggcattactgacctccaggggctgcgcctctacgttgctgcagccatcattgagtctccaggtgggtgactttcccttattgtaaccccagacccttgcctctgacctctgagctaaccctctgtcctccggcaccaacaccaccccacttctcacatctcatctcagactcaaaaccaggaaacacccaggagacctggtttctctccaactctgtctctgtgactcggcccttttccctggctgagtttatttatttctttgctcgttctgctcattccttcactcctccagtggacatgtgttgttcaatgccccgtgctaggcctcagcatgcacagacatgttggggaccagcctcaacgccacccgtagggttcctgaagtccattggtgacacaggaatgagaagagacaggttaagagttcataaagagtgggggccagggggccaattgcaaaatggaggctgcaaaaggctcagagctctggtctccacactattttttgagtacagtcactcagatctaagaagcagatgttcagggagaaacagtgaaagggaggcagtgggtcataggcgtaatctatagcaatagagttttaaatgaatctcctttgtgctcaaacagcatgtctttaaattatcggagagtagctggtggaagtgggcttagctagaagactgcatgtctgtccaatgcttcaaaggagggtctttctccttgaacagagtgtttacagataagacagggggtctcactctgagcatgggaacatgatggcaattaggaggcttttcttctcagaggcctcttgtggctttccacaacttattgtctcatatttttatggacagtttatacaggcaccccacaagtccttttcccaacatgcccccctccctttttttttttttaaccgctattgctattatggcttatttgtggtgtttggtctgttttcagaagtgtcttttgcatctgtagactaaaagtaaacagcataaacagatacacattaaagtaaaatttgtaatagttgatcctttaatggtcttaatctgtttaagaggatttatgtttgaaagtccgtcagtagctccaatgagaatgtcagtctcaggcaggagggttaaatgagcctgagatgctttaaaaacctgtttttttaaaatttggttatatttaatgttaaatttttatttttttcttttagatgatgtctaactttttaaaaatgatgtttagtagtattatacgaatggggagttatgtagaaattggaagtatttcaattacattgtacttctaattgatgttttaagtttattgtacgatcttccatttaaataacagtctgtctaagatcatttgtttgatttgtcaattgttggtctatttgggtctgagaattccacaattttgaggaattttttgttaactatttatatattttgtagtttgaacagaggagtgtaaagcaattccagcagccgcagcagtagctgtgactgcaataaggcccataagactgttataagggtaaaaataaatctctttgttttggtaaacacttttttttaaaacatttttgtgacaatatgaatggaaggagaggctttctaaggtctattgagggaaaccagtatccaaactcctttcttagtttttatcagtaacacagatgtttttacaccgaacgtggaattaatacaggtgaaaaggtgacagttttgacaagtaatagtttgagaattaggtcgaatgtcaatatttttgaccattaacataaaaggagggttgacacaactctgaatgggcactgttttgttggaagaaaactgatacgcaaattgaagtttttaaccttttttttttaaagataatatatttttttctaaacttaaatatgagattgggccattattaactttcataatttggagtgtttagggcctattattggattaattattttgggatgtgggccagctgtactaaaattggtccaaattatgggaaaatgagcacgtttttcagtgtaagtagtgttacctttttgatagtatagtttctgttttagttttgtcttgtatttattattttgatgggtacaattaactgtaaaggtcccctcaggggaccaattaatgacaatttcataggaattattttgtagtaccatagtgtgatcagagatgtaattttttttaattaatatttttaaattatttgaccattgttaaggttgttggcacctcttttttgggggcttaaactgttaattgaattgaactctgtgaatgatccgggctccatccagaaaataaatgataggatactggtctttgattatgacctggaattttaactagtcaatgttgtcggtagccttttaggcaaccgatagttggccttatgtaaagaggggggaactgataacctatggacacatttattaacttttttttttttcctttgggtgagagggcccatgagtatttgtaggcttagggatccaaacgctattattaacataaacttcaactgggggttttaaccatgtgacaggcctaattaaaggcaggaatgggacacatgcccaataggtataattttgggctgttgtagccacaggtttgttaggcgaggaggtcactgtttttattttggctttgtattctaggattagtaaataacagaagacaaacatgagtataattagtaacttttttttttagtaaaagagtgacctgtagtgttacttggcatcttagtttactatatgttattaatgaggaaccccactgggggtatgttaatttattctagctaagcagttatgttattagaagctgagaagggggtgtttgttaaagtaacagggcagaagaaaggcggatttaagatacgagcttaatacagtgtagcaggtataggtagtaggcaaagtgagagaattaaaaatgaataaattatttggcttagacttttgtttttttagtataatgtctgaggcctgtgttgtttgtggaagtcgcattgttgaggctgtagttcctgtagggtcttttttaggctggttcaaatgtttttttattttttaattttttatcctttgatgaggatgtagtctttaggctggtactggaaattttaggagtggcgtctgtgttaagagactttttacaatttttaaagagcaggttagtgttttaagaaaaacttgtgttttattttaatgtttagtttatagaaaactggatgatatctttttaactttagtaaatacgtttacacacggaattttttacaattatcattttaaaacttgtttagatctttaaaacaaaattaaacaaccttttttgtataaattttttataactttttttatgacttttacagacaatttttaacatgtcttaactttttatgttttataatttttttactaaaggtacatttttataactttttaaatttttttacttttttgtatttttttgatttttgtcttagtcttttttttacttttatttttttaaatgtgtaataattagatgagtgttggtaacaatggatgtatgtacatattttagtttttaaaatttagggatgtgtttaacatctgtttgccagaactgactaggttccaattctttacggttaacacctattgaaggagggtatgtgcctgtgagctggtaatctgggcattgtgggataatttgtttagccagcctctgtgtaagttgaaattatttagataagtttctccaattttggtggaataatcgatgtgattgggtggcttggtcaagcagtgatgtcataacctgaaggtctgcttgattattgccgtaagccaatgggccaggcagagagctgtgggctcgaatgtgtgtaataaaagtaggatgtgtaccttggtctagtaattgttgaagttgaagaaaaagaccacacagagtgggctccagagcaaacttaaggctgtaatagtttttaaataaatacacagaataaccttagctctctgaatgttagtaaattcagatcaagtgattggattatgtggtctccaccagactgttgctttttcatgtttaccagacccaccagtaaaaacagctatggctccttccaaaggggcatcacaagtaatttttggaagaacctatgtagttaattttaagaattgaaaagtttttaggataatgattattaatacatccaacaaattttgttaaattaatctgtcatgtaactgagttaataaatgcctgtttaacctgatttttatttattggaactataatttttattgggctcagtgccacaaaatttaataattcatatatgagcctgtccaattagaattgccatctgatttaagtatactgtaagtgcttttatggtattatgtggcaaaaaggaccatttaactaaatcatcattttgaacaataacccccattattgtgtggttagtgtgaagtagggaacacaatgaattataaaggcaagtctgagtcaatcctactgacctgggcttgctgaattttgttttcaattactgataactctttcatggcctcgggtgttagttctctgttactgcgtaagttggtatttcccctcaatattgagaagagattagacatagcataagtaggaattgctaaattgggccaaatccaattaatatcttctaacaatttttgaaaattatttaaggttttgaaagaatctcttctaatttgaaccttttgaggcttaatggctctatcctgtacttgtattttcaaatactgaaaaggagtggttgtttgaattttgtcaggtgctataagtaattcagcatttgtaattgtcttttgcaaagattaataatattgaataagttggtctctactttttgctgcacaaatctggaaactgatctctaacaggctggatagttctgcctacaaaagtttgacaaactgtgggactatttaacataccctggggcaaaactttccaatgatatttggctgcaggttttttgttattaacggcaggaatggtaaaggcaaattttttgaaatctgcctctgctaaaggaattgtaaaaaagcagtcttttaaatctataataacaagcggtcagtctttagggagcacagtgggggatgggagcccaggttgtaaggctcccatcggttgaattacagcgttgacgccatctaccggactttttcttaattacaaatactggggaattccaaggagagaaagtgggtgaaatatatcctttttttagtagtttattttataaagcacccccaacttttccttagggagcggccactgttcaacccagacggggcgccgggtcatccattttaagggaaattgctccttcactgtaataactgtagggtgaacctgaattgccccatctccataatgaactgtgggtcgggcaataatgggcacggtgagccaagtctcgggctccctccccctgcacccactcggctgaggaggaggtggccattctggacatttctctacaggaaccgtgggctgaacaattttttgagtaggtttagggagactggggagattggcataaatcatcttcagactctcctttttgttagtactcggtagaggtggttcagagttctgattatcaaactcctctctctcctcctctgactcagcctcattatctgtctgaaaaggctccagtgctgcatgcaccaatgaccaaagcgaccaaacaggcaaaggaatttcctttccttctctatatgctcttttaaggtcctttccaactccttcttaatgttttaatttcaaagtttcctgttttgggaaccaagggcaaaattgttccatagcatgaaacaaatccataagattttccgtatcaacttttaccccaccatgcatgcttgaagagctgccgtaggaagctcaaatacgtggtgtacttactttcagtttttcccattgtgtccctagctttctctgggcgccccgcttacctgtagaggttaaaacttttatgtccttgggagtcctttgttcgttggtcctctgtttcacatgcttgagcgtttcctcaccagattcttttgggccccacgttgggcgccagaatgttggggaccagcctcaacaccacctgtagggtacctgaagtctggtggtgacaaaggaatgagaagagacaggttaagagttcataaagagtggaggccagggggccaattgcaaaatggaggctgcaaaaggctcagagctctggtctccacactatttattgagtacaataacttagatctaagaagcagatgttcagggcaaaacagtgaaagggtagcagtgcgtcacaggcataatctacagcagaagcgctttaaatgaatctcctttgtgctcaaacagcatatctttaacttatcggagagtagctagtgggagtgggcttaactaggagcctgcacgtctgtccacattccaatgcttcaaaggagggtctttctccttgaatacagtgtttacagataagagagagcaggtctcgctctgagcatggcaattaggaggcttttctcctcagaggcctcttgtggctttccacaacttattgtcccatatttttatggccagtttatacaggcaccccacaagtccttttcccaacacagacaggaatacggcagcctgtgccctgggagctcactgtcttgtgggagggaaccactcaagccactccccacttgtcctcctgtccctctcttcttgggctctgtcccccacctctctctgtcctttgtcttgcaggtggggagatggaggaggcagagctcacatcctggtattttgtgtcatctcccttctccttggatcttagcaagaccaagcgacaccttgtgcctggggcccccttcctgctgcaggtttcttccagaggggaaggatgagtagggaggatgtggtagttaggagggctcagggtctgaccactctcttttgcctgccctcctttacctgcctaggccttggtccgtgagatgtcaggctccccagcttctggcattcctgtcaaagtttctgccacggtgtcttctcctgggtctgttcctgaagtccaggacattcagcaaaacacagacgggagcggccaagtcagcattccaataattatccctcagaccatctcagagctgcagctctcagtaggactcctcggacccctgggagatggtgggggaaggggaggagggtgagctggggtcccaaggatccatggcctgacttggggggaaggtggggtacttggctctgagctactaccctattcgcacctgaccccctctccaggtatctgcaggctccccacatccagcgatagccaggctcactgtggcagccccaccttcaggaggccccgggtttctgtctattgagcggccggattctcgacctcctcgtgttggggacactctgaacctgaacttgcgagccgtgggcagtggggccaccttttctcattactactacatggtgtgcatgagctggggagtcacggagggctggggtgcagggaagagccctctgggtggggctgggggggttcaaggctgaggctgtcccatgaagaggcaaccactcttgtccctcccattcttggcccagatcctatcccgagggcagatcgtgttcatgaatcgagagcccaagaggaccctgacctcggtctcggtgtttgtggaccatcacctggcaccctccttctactttgtggccttctactaccatggagaccacccagtggccaactccctgcgagtggatgtccaggctggggcctgcgagggcaaggtgaccggggtcaggagagatggcacttgtgccgagggggttgaggacagggtgattgccaacagggcatggatttagcttgggggcagtgaggataccgggactgaaggaagctctcccactctgaccgcccccacctgccgcccctgccagctggagctcagcgtggacggtgccaagcagtaccggaacggggagtccgtgaagctccacttagaaaccgactccctagccctggtggcgctgggagccttggacacagctctgtatgctgcaggcagcaagtcccacaagcccctcaacatgggcaaggtttgtccagaccctctccacagctctctcacccctccatggctcatccccctgcttccctgagccttgggcgcagcccctggatcccactgaggctccccacagtctcttccccacttggccctgtggtctccatctcctggctctgtatcctttcctatccccccatgtgctgccctctcacctgtgccgagtgctcagtcctgcccctcagccacacttggctcctagcattcctgcctttcttgcaggtctttgaagctatgaacagctatgacctcggctgtggtcctgggggtggggacagtgcccttcaggtgttccaggcagcgggcctggccttttctgatggagaccagtggaccttatccagaaagagtgagaacagagaaggaaggggagtgggtggcgggaagataaggaaggaggaagggcctgaggggaccagctggaagagtccgggcaggaagggctgggcaggggaaggggaggaggggaggaggccgagtgcctgacggctggactgcagcctttctctctaccaggactaagctgtcccaaggagaagacaacccggaaaaagagaaacgtgaacttccaaaaggcgattaatgagaaatgtgagttgcgggtgcctaggcagtagcttgggctctccacctgggatccgggttgggggtctgcctctctgcccctcggctccttgctgaacccacgtgtggtatttggggccagagatccgaattccgggattacgagtggaaggtgggcagctctctccagcagcctctcttatgttgctggtctcaaggggtcggggcgggggctgaggtgtatgtcctttttgtcctctcatgctcacccccacctggccctgcagtgggtcagtatgcttccccgacagccaagcgctgctgccaggatggggtgacacgtctgcccatgatgcgttcctgcgagcagcgggcagcccgcgtgcagcagccggactgccgggagcccttcctgtcctgctgccaatttgctgagagtctgcgcaagaagagcagggacaagggccaggcgggcctccaacgaggtgaggggctgggtggggctagggcacaggtggcggcgcttggaaaggcagaacggtcccctcctcactcccgtccaccgtggtcccccagccctggagatcctgcaggaggaggacctgattgatgaggatgacattcccgtgcgcagcttcttcccagagaactggctctggagagtggaaacagtggaccgctttcaaatgtgagagtgtgtgccggcccggccttttctctgtgctgtgtctcggggccagccggggtagacgggccttctctgcctttccctacacagattgacactgtggctccccgactctctgaccacgtgggagatccatggcctgagcctgtccaaaaccaaaggtgatgtcaccctgtctgggcctcaggtgaccctgcttccatttccctgtaccccagctccctgttccctttgctcttagtgtaggaagagggtccagtgatctggggaggtctgtgccagcgtgcagctggcgtgggccagagggcagaggcggactgagacagagctgggtcacccccacccctccctcctgtggccctgaagctttgatggcccctctgatctctgcccctgtgcccacgcttcctttccctcaggcctatgtgtggccaccccagtccagctccgggtgttccgcgagttccacctgcacctccgcctgcccatgtctgtccgccgctttgagcagctggagctgcggcctgtcctctataactacctggataaaaacctgactgtgaggccccatgggagcctgagcatacaggagttgggggagccagggcccagtgaggggtggggaggctaaccgggccaggactctggccatcctcgttttcctgccctcaggtgagcgtccacgtgtccccagtggaggggctgtgcctggctgggggcggagggctggcccagcaggtgctggtgcctgcgggctctgcccggcctgttgccttctctgtggtgcccacggcagccaccgctgtgtctctgaaggtggtggctcgagggtccttcgaattccctgtgggagatgcggtgtccaaggttctgcagattgaggtgaatggagcacccctgaatataagtccccgggcccccagctttgtcctccaccctcagcactctctctgctggccaggccaggggcccaacacccaaaccaatgccttggtctgttcccatcttctacaattctgatccaactctgtccctggagttgaaactcaaagttctgggggagtctgcgctagcagggcaggctgtagtcctgtgtgacctcacaaccatgttttccctgagacagaaggaaggggccatccatagagaggagctggtctatgaactcaaccccttgggtgagtgaccctctacctccagccattggtttcctaagtgggtacaggtggtgggggatgtggacagcaggacaggctgccaacttcccccatttccccagaccaccgaggccggaccttggaaatacctggcaactctgatcccaatatgatccctgatggggactttaacagctacgtcagggttacaggtgggagtgccctttagtcccttcccagtggccaccttcggattcatgtgggacttgtggatccctgcttggtcccactccccgtgagcctctgacacagagtcctcagacctccaccctctccctcccatgtagcctcagatccattggacactttaggctctgagggggccttgtcaccaggaggcgtggcctccctcttgaggcttcctcgaggctgtggggagcaaaccatgatctacttggctccgacactggctgcttcccgctacctggacaagacagagcagtggagcacactgcctcccgagaccaaggaccacgccgtggatctgatccagaaaggttctgggtgcaagggcaagcaggaggggggccaggaaaggacagttactggaagatggacagcccaggaggctacagagggaaagaaagggggcccctgatgaggatggggagcatggccttgggctcaaacagcagaagggtgagtgtcacctgagcggccacctctcctctccaaggctacatgcggatccagcagtttcggaaggcggatggttcctatgcggcttggttgtcacggggcagcagcacctggtgagcttgggagagtggttccagggttctgagggggtcagggctggggcaggggtgggacagagctggtatgatgggagggtggataaccaggcacctgggggcgtgggcataatgagaagcaagtccttatccccaaccctcctttcctgccctccaggctcacagcctttgtgttgaaggtcctgagtttggcccaggagcaggtaggaggctcgcctgagaaactgcaggagacatctaactggcttctgtcccagcagcaggctgacggctcgttccaggacctctctccagtgatacataggagcatgcaggtgcgggcatgctggggctggcccgagaagcgcctgtcggaggactctctttgccccttccccctcctgtttgacatcttttctccccttactaggggggtttggtgggcaatgatgagactgtggcactcacagcctttgtgaccatcgcccttcatcatgggctggccgtcttccaggatgagggtgcagagccattgaagcagagagtggtaagttcagtggcgtttctgccctctgctggcccccagctctctccctttttcctcaggaacccaggggtccaggcccaagaccctcctcccgttttcttccaggaagcctccatctcaaaggcaagctcatttttgggggagaaagcaagtgctgggctcctgggtgcccacgcagctgccatcacggcctatgccctgacactgaccaaggcccctgcggacctgcggggtgttgcccacaacaacctcatggcaatggcccaggagactggaggtgaggggtgaggggctctggcagtgagcctgaggcccaggggaccttaggatccctgagtgtgcccagagggagaggctggatgaagactcagaggaggaatgaagttataagcaggggtgggttgggggagactcaggagagcccagcagggggtggctaagggccaggggaccaggctcttctccctgccttcctgtttactcgtggtctcccttcactttcagataacctgtactggggctcagtcactggttctcagagcaatgccgtgtcgcccaccccggctcctcgcaacccatccgaccccatgccccaggccccagccctgtggattgaaaccacagcctacgccctgctgcacctcctgcttcacgagggcaaagcagagatggcagaccaggctgcggcctggctcacccgtcagggcagcttccaagggggattccgcagtacccaagtaggggccgtccccgggctctggcgggggtgggtagtcctcagaccaagggcttgcttgagtcctggctcaacctccctaggacacggtgattgccctggatgccctgtctgcctactggattgcctcccacaccactgaggagaggggtctcaatgtgactctcagctccacaggccggaatgggttcaagtcccacgcgctgcagctgaacaaccgccagattcgcggcctggaggaggagctgcaggtgaaccactccctggtgaaccactccctcgcctgggtagccaggacacctgggcctcgtggccaggccagaagccgtccccaccctcccacccgtggaatccccgcagcacttcttcctggggtcttcgggggaagactgacttcctggctgcgtgacctggagctctgagcttcagttttctcacttgtagagtaacatacacagagttcaccctacagggtcgttagaaggctgaagtgagataattcatgtgctggtataaactttgtggaaatgtgaggtggggagagggggtggggctgttttgaggaaggagataagttattggagccgcaaaaacaggtttgcttgtgcccttctaacatcgccttcccttttctgttgctgaagttttccttgggcagcaagatcaatgtgaaggtgggaggaaacagcaaaggaaccctgaaggtgagggccagggaaggggtggggccaggcactggtggaggagagggtgtggagtgagaggcctgtgggcagaggcacatggtccggggaaggaggcagacacctcagggttggtgtcccgtgcttccgtcctgggtgtttttccccctgcttgctttcgcttgctctccccatctctgggtacctgttgtttcctttacccgcctcagtgctggtggctccgaatcccactcctcagcccaggcctcttccctgaaccatgggccccactcgtcccactcccacagcacctcagacgaggcatgtcccaaagcccttcttcattctgtgtctcttgtctggctggtgggagcccctcccagccaggagcccagccactactctagaggccgtgttagtggcccctctcccaagcctgtccttatgtccctagtgactcctcctctgctcccctgctgcctgtggcccttggtgctgcatcctagattctgtgctgagacggccttctccctacctggaacttctctctacctcctgtctcccctgtctgatccactgtccacacggcagtgacactgaccttccaaaagccccagccagatcagccttggggaaaagtcactccccgctgcccacggctcagatggctgggcctctgcccacccctccggccagacagctctccttgtctacacagatccccttgcctttcctgtccttccctgcttcttggcccacaggacaagctctttcttctccttcaagccttggccagaagcctttcctgagcttttcagtccagcctcttcccagcacagtctggagtgttggcctctgggggcaggcccctgcttctttacctctctgtctcgcctgacgcctgtggcgaatgtggtgccactcgtgtgtgtggactgtgcagtgacggggaggaaaaggggctgaaggcctcaaatcctgtagcccagggagatgcccttaggtatggcaccagagaggtctgtggcctcacatgtcccacgtcctctccctgccccttgctgagccaggtccttcgtacctacaatgtcctggacatgaagaacacgacctgccaggacctacagatagaagtgacagtcaaaggccacgtcgagtacacgagtgagtgtgggggttgggaggccttggggccaggcaggggctggcgcagggagccgggtggccatcccagccctcctcacaatgcttccctgtgcagtggaagcaaacgaggactatgaggactatgagtacgatgagcttccagccaaggatgacccagatgcccctctgcagcccgtgacacccctgcagctgtttgagggtcggaggaaccgccgcaggagggaggcgcccaaggtggtggaggagcaggagtccagggtgcactacaccgtgtgcatctggtgggcgccgggagctgccctgggccaggggagggagggcaggacccaggctggggctgggcttctggagcccgcgcaggcagaacctggacgacagctcacacgtctccacaggcggaacggcaaggtggggctgtctggcatggccatcgcggacgtcaccctcctgagtggattccacgccctgcgtgctgacctggagaaggtgtggtcagccacccagggcaaccccctctgtcccaggtactgagccctgtcatgtgcagggcctgtgaccaactccccttttccacagctgacctccctctctgaccgttacgtgagtcactttgagaccgaggggccccacgtcctgctgtattttgactcggtgagtggggagagatgaggcaggaagggactcgatggcaccgggtttactgagtatgcgttaggaggtttctcaggagacagctgtgtcagcggctggtgctcttgagaacttgtgatgtcatcagagagaaggacaagaatgtgagcccgtgagacacagcagagtaaggggcagacctgcaggcggcagggaccgatgccagtcagcagggaccctcagggtttgagagggagtctttcctaatgctggttttattcagcttgaggggctgcctttgtttttttgttgaacttcctatcttttttttaatattaaagcgtattttcctttacaaagtgatggtggccatagatgatagttgtatttgtcttttcacgaccttatttggctaaaatagttatcaaccctcttacggctctcaaaacatttttatttatttatttagtaaagacagggtctcgctctgttgcccaggctggtcttgaactcccggcctcaagcgatcctctggcctaggcctttcaaagtaccggatttacaggccagagccaccatgcccggccttcaaaaaaagttttggaacatttactgtaacctctgggagaaaatgtgagaaaggtgtggtggctgtcattagccagctgtttgtaggtcagggagacccctacccagtgtgtgcagaggggccagcccccatcagctggggaagcctggctgacacatctgggttgaacacaatagaaaacacagagccaacaagattcccggatagggagctgacggtgcagcagcctagctcaggagggacactggcacggcaccgtgtggactgggcccgcgtgggcacgaggaggggtcaggcctgggacctgagtcggggggtcaggcaggatgacagaacctgcagttaggttgtggcaaataaaggaggacccagttgtatccatgacaaagatgaggccgcgaggagggcgagtgggtttgggggcaggcagagtgccttggagaacttacaggtcctgccacaatcctaatgcaaggatggagctgcaagttcagtttgggaatcatcagcctggattggtttggtggaagccagggagtggttgagacccccacaggggagctctgaggaaggaagttccgaaggagggaacgtaagaaatgaccaggtcagaaccaagggtggtccagaagctaacccttagcttagggacagtttcacagagaacacgtccatgatgcaagactctgctgagggcctggagcagtgaagactggggcaaggtcaccctctgggaagtgaagtcaccagagaccttgcggagcagctttgagagttctctgagtaggaaggtaacagaatgtgaaggacactggagagaaggccaataggaagcaaacaaaaacaggccaaggaaacccagtacagggggctgcagggcccagggagtgggtccctcatctctcctccccacgcttggccaggtccccacctcccgggagtgcgtgggctttgaggctgtgcaggaagtgccggtggggctggtgcagccggccagcgcaaccctgtacgactactacaaccccggtgagcactgcaggacaccctgaaattcaggagaactttggcataggtgccctcctatgggacaatggacaccggggtagtgagggggcagagagccctggggctccctgggactgaggaggcagaatggaggggcctgtgccctaactcctctctgttctccagagcgcagatgttctgtgttttacggggcaccaagtaagagcagactcttggccaccttgtgttctgctgaagtctgccagtgtgctgagggtgagactgagggcctggggcggggcagtggaggcgggatggccggggccccccccacactgtctgatgggttccccaacttcagggaagtgccctcgccagcgtcgcgccctggagcggggtctgcaggacgaggatggctacaggatgaagtttgcctgctactacccccgtgtggagtacggtcagtcttcccaccgaggccctggcctgaccctccctcggggaccggccgttttggtctctctgggtgtagcctgctcctcttacaggtcatgcacgcagcctgtttgctctgacaccaacttcctaccctctcagcctcaaagtaactcacctttcccccttctcctcaccccctcttaggcttccaggttaaggttctccgagaagacagcagagctgctttccgcctctttgagaccaagatcacccaagtcctgcacttcagtatgaagcaaaccggagaggcgggcagggctggggggagacagggaggctgaggtgtggccgaggacctgaccatctggaagtgtgaaaatccccttgggctgtcagaagccttgggcttggccataaatagggaggcagtggcacctctccatgggggtggcgaaggtggaatgagaggatctacacagagtccccagcctgggctcaccctgcaccttctcttcccctctgaccacttttgcgcacgtcatccccgcagccaaggatgtcaaggccgctgctaatcagatgcgcaacttcctggttcgagcctcctgccgccttcgcttggaacctgggaaagaatatttgatcatgggtctggatggggccacctatgacctcgagggacagtgagtcatctggtcccctcagtctcttgtcctccccatgcctcgccacctaggccttgcccctcagaagccagatgcctgtgctctccgtttccacctgccatcctcccgagccctgctgactgcccctttgccccctgcagcccccagtacctgctggactcgaatagctggatcgaggagatgccctctgaacgcctgtgccggagcacccgccagcgggcagcctgtgcccagctcaacgacttcctccaggagtatggcactcaggggtgccaggtgtgagggctgccctcccacctccgctgggaggaacctgaacctgggaaccatgaagctggaagcactgctgtgtccgctttcatgaacacagcctgggaccagggcatattaaaggcttttggcagcaaagtgtcagtgttggca

SEQ ID NO: 5 - DNA, 14222 bp, Macaca fascicularis
  source 1..14222: mol_type = other DNA
caactctgccccaagccctagcttggccagaaggtagcagacagacagacggatctaacccctcttgcatcctccagccatgaggctcctctgggggctgatctgggcatccagcttcttcaccttgtctctgcagaagcccaggtcctggaggcgggatgctgggtgcttggattggggcagggctggcaacaggacccgattcaggagtgagggagagcagggttggagggtcagagccaagtctgactgctgatcctgtctgttctccccaggttgctcttgttctctccttctgtggttcatctgggggtccccctatcggtgggggtgcagctccaggatgtgccccgaggacaggtagtgaaaggatcagtgttcctgcgaaacccatctcataataatgtcccctgctccccaaaggtggacttcacccttagctcagacagagacttcgcactcctcagtctccaggtaactagaccccacgccctcctgctgcttgtggggctcccgccctgttcccctctgtcctgtaagtgtcttcatcttcccaccggcctcctcccctcctgtcttcccagcctcgcattctccttctgtgtttctcccttggtctctgtcctttttggccagctctctcttgctctgtgacccgctccgtctccctctcctgacaggtgcccttaaaagatgtgaagagctgtggcctccatcaactcctcagaggccctgaggtccagctggtggcccagtcgccatggctaaaggactctctgtccagaaagacgaacatccagggcgtcaacctgctcttctcctctcgccgggggcacctgtttttgcagacggaccagcccatttacaaccctggccagcggggtgagtctcagccccagggcctcaacattgaaccccctccaagccctgtcaggatgagtttggtgccccctaagtgagataaccggaaagaaagtgccacatgggagggctgcttaggaaatatttgtcccccactccctctgtggagttggacccactctccccttgcacatggatccctgctcacctctctccccctcctctcccagttcggtaccgggtctttgctctggatcaaaagatgcgcccgagcactgacaccatcacagtcacggtggaggtgagtccccgacctctggccttcctgatcctggccactgatgtgacctcctgcctgtgaccacttctccccttgcagaactctcacggcctccgcgtgcggaagaaggacgtgtacctgccctcgtccatcttccaggatgactttgtgatcccagacatctcagagtgagctctcccaatgtgggggctgtccccaagctacaccatcccaattcctgttaggctctccacctcccacacagaggcacgtcccgggatgccctggccctcagcctcctgagcctctggttaacccccacagtcctctgcccagggaagcaggcctctggctctccgtgccccactgcacagatgggctgagtcccttccttgtccattctcaggccagggacctggaagatctcagcccgattctcagatggcctggaatccaatagcagcacccagtttgaggtgaagaaatatggtgagagctggaaactggagggacaggcaactgctttcctgaaggaaataagggtgggaggaaacatagtgggtgcagctcagggcagggagagatgggtgccacagccctgggtggaggggattctttgagctagagtctgacctgcctatcccttcaccctgggtcagtccttcccaactttgaggtgaagatcacccctggaaagccctacatcctgacggtgccaggccatcttgatgaaatccagttagacatccaggccaggtaatacctccctccccacctctgcccgccagcactgtgtcctgctccctactcaatatgaatgggctcctgcttccccgccctcaggccattattccccccagcccttggcccaccctcttctctctgtcacgacaggtacatctatgggaagccagtgcagggggtggcatatgtgcgctttgggcttctagatgaggatggtaagaagactttccttcgggggctggagagtcagaccaaggtaggaaggagaatagggactggggaggggaaggggcaagggaggtgagactcagtcaccatcatatgtcctgtttctttctatgccccagctggtgaatggacagagccacatttccctctcaaaggcagagttccaggatgccctggggaagctgaatatgggcatgactgacctcctggggctgcgcctctacgttgctgcagccatcattgagtctccaggtgggtgactttcccttattgtaaccccagacctcgcctctgacctctgagctaaccctctgtcctgcagcaccaacagcacgccacttctcccacctcgtctcagactcaaaaccaggaaacacccaggagacctcgtctctctccaaccctgtctctgtgactcggcccttttctctggctcagtttatttatttatttgcttgttctgctcattcattcactcctccagtggacatgtgttgttcaatgtcctgtgctgggcctcagcatgcacagacaggaatacggcggcctgtgccctgggagctcactgttttgtgggagggaaccactcaagccactcaccatttatcctcctgtccctctcttcttggattctgtcccgcacctctctctgtcctttgttttgcaggtggggagatggaggaggcagagctcacatcctggtcttttgtgtcatctcccttctccttggatcttagcaagaccaagcgacaccttgtgcctggggcccccttcctgctgcaggtttcttccagaggggaaggatgagtagggagggggtggtagttaggagggctcagggtctgacaactctcttttgcctgccctcctttacctgcctaggccttggtccgtgagatgtcaggctccccagcttctggcattcctgtcaaagtttctgccacagtgtcttctcctgggtctgttcctgaagtccgtgacattcaacagaacacagatgggagcggccaagtcagcattccaatcattatccctcagaccatctcagagctgcagctctcggtaggactcctcggacccctgggagatggtgggggaaggggaggagggtgagctgcggtcccgaggatccatggcttgatttggggggaaagtggggtgcctggctctgagctactaccctatttgtacctgcccctctctccaggtatctgcaggctccccctatccagccatagccaggctcactgtggcagccccaccttcaggaggccccgggtttctgtctattgagcggccggattctcgacctcctcgtgttggggacactctgaacctgaacttgcgagccgtgggcagtggggccaccttttctcattactactacatggtgtgcatgagctggggagtggaggaggactggggtgcagggaagagccctctgtgtggggctggggggttcaaggctggggctgtcccatgaagaggcaaccactcttgtccctccccttcctgccccagatcctatcccgagggcagatcgtgttcatgaatcgagagcccaagaggaccgtgacctcggtctccgtgtttgtggaccatcacctggcaccctccttctactttgtggccttctactaccatggagaccgcccagtggccaactccctgcgagtggatgtccaggctggggcctgcgagggcaaggtgactgggatcaggcgagatggcacttgtgctgaggggattgaggacagggtgattgccaacagggcatggatttagcttggggggcagtgacgatactgggactgaaggaagctctctctctctgaccacgcccaccttcggcccctgccagctggagctcagcgtggacggtgccaaggaataccggaacggggagtccgtgaagctccacttagaaactgactccccagccctggtggcgctgggagccttggacacagctctgtatgctgcaggcagcaagtcccacaagcccctcaacatgggcaaggtttgtccagaccctctccccagccctcccacccctccacggctcatccccctgctgtcctgagccctgggcgcagcccctggatcccactggggctccccacagactcttctccacttggccctgtggtctccatctcctcactctgtatcctttcctatccctccatgcgctgccctctcacctgtgccaagtgctcggtcctgccccatcagccatgcttggctcctagcattcctgcctcttcttgcaggtctttgaagttatgaacagctatgatctcggctgtggtcctgggggtggggacagtgcccttcaggtgttccaggcagcgggcctggccttttctgatggagaacaatggaccttctccagaaagagtgagaacagagaaggaaggggagtgggtggcaggaagataaggaaggaggaagggcctgagggagccaggtaggaagagtcgggcgggaagggctgggcaggggaaggcggggaggggaggaggccgagtgcctgacggctggactgcagccttgctctctaccaggactgggctgtcccaaggagaagacaacccggagaaagagaaacgtaaacttccaaaaggcgattaatgagaaatgtgagttgtgggtgcctaggcagcagcttgggctctccacgtgggatcaaggttgggtgtctgcctctctgcccctcgcctccttgctgaaccaatgtgtggtatttggggccagagatccgaattccgggattacaagtggaaaggtgggcagctctctccaccagcctctcttatgttgctggtctcaaggggtctgggcgggggctgaggtgtatgtcctttttgtcctctcgtgctcacccccacctggccctgcagtgggtcagtatgcttccccaacagccaagcgctgctgccaggatggggtgacacgtctgcccatgaggcgttcctgcgagcagcgggcagcccgagtgcagcagccggactgccgggagcccttcctgtcctgctgccaatttgctgagagtctgcgcaagaagaacaggaccaggggccaggtgggcctccaacgaggtgaggggctgggtggggctagggcacaggtggcgctgcttggaaaggcagaacggccccctcctcactcccatccaccgtggtcccccagccctggagatcctgcaggaggaggacctgattgatgaggatgacattcccgtgcgcagcttcttcccagagaactggctctggagagtggaaacagtggaccgctttcaaatgtgagagtgtttgccggcccagccttgtctctggctgtgtctggggaccagcccagggtgtgacggagcttctctgcctttccctacacagattgacactgtggctccccgactctctgaccacatgggagatccacggcctgagcctgtccaaaaccaaaggtgaggtgaccctgtctgggcctcaggtgaccccctttccatttccctctacgccagctccctgttccctttgctcttagtgtaggaagagagtctggtgcagctggcgtgggccagagggcagaggcagactgagacagagctgggtcaccccgcccctcccttctgtggccctgaagctttgatggcccctctgatctctgcccttccacccacacttcccttccctcaggcctatgtgtggccgccccagtccagctgcgggtgttccgcgagttccacctgcacctccgcctgcccatgtctgtccgccgctttgagcagctggagctgcggcctgtcctctataactacctggctagaaacctgactgtgaggtcccgagggagcctgagcatacaggggttgggggagccagggtccagtgaggggtggggagcctaaccgggccgggactctggccgtcctcgttttcctgccctcaggtgagcgtccacgtgtccccagtggaggggctgtgcctggctgggggcggagggctggcccagcaggtgctggtgcctgcgggctctgcccggcctgtcgccttctctgtggtgcccacagcagccgccgctgtgtccctgaaggtggtggctcgagggtccttcgacttccctgtgggagatgccgtgtctaaggttctgcagattgaggtgaatggagcacccctgaatacaagtccccggccccccagctttgtcctccaccctcagcactgtctctgctggccaggccaggggcccaacacccaaatcaatgccttggtctactcacgtcttctacaattctgatccaactctgtccctggagttgaaactcaaagtcctgggggagtctgcactggcagggcaggctgtagtcctgtgtgaccccacaaccatgttttccctgagacagaaggaaggggccatccatacagaggagctggtctatgaactcaaccccctgggtgagtggccctctacctccagccatcggtttcctaagtgggtacaggtggtgggggatgtggacagcaggacaggctgccaacttcccccatttccccagaccaccgaggccggaccttggaaattcctggcaactctgatcccaatatgatccctgatggggactttaacagctacgtgagggttacaggtgggagtgccctttagacccttcccagtggccaccttcagattcatgtgagacctgtggatccctgcttggtcccactccccgtgagcctctgacgcagagcctcagacgtccaccctctccctcccatgtagcctcagatccattggacactttgggctctgagggggccttgtccccaggaggcgtggcctccctcttgaagcttcctcaaggctgtggggagcaaaccatgatctacttggctccgacactggctgcttcccgctacctggacaagacagagcagtggagcgcactgccccccgagaccaaggaccacgctgtggatctgatccagaaaggttctgggtgtgggggcaagcaggagggggaccaggaaaggacagttactagaagatggacagcccaggaggctacagggggaaagaaaaggggcccctgatggggatggggagcatggccttgggttcaaacagcagaagggtgagtgtcacctgagcggccacctctcctctcccaggctacatgcggatccagcagtttcggaaggcggatggttcctatgcggcttggttgtcacggggcagcagcacttggtgaggtttggggaggggttcccgggctctgagggggtcaggtcctgggcaggggcaggacagatctggtacaatgggagggggaataaccaggcacctggggcgtggccgtagccatagcaagtccttatccccaaccctccttcctcccctccaggctcacagcctttgtgctgaaggtcctgagtttggcccaggagcaggtaggaggctcgcctgagaaactgcaggagacgtctaagtggcttctgtcccagcagcaggctgatggctcgttccaagacccctgtccagtgatacacaggaacatgcaggtgcgggcatgctggggtggcccgaggggcacctgtaggaggagtctctttgcttcttccccctcctgtttgacatcttcttttctcccctcactagggcggtttggtgggcagtgatgagactgtggcactcacagcctttgtgaccatcgcccttcatcatgggctggccgtcttccaggacgagggtgcagaggaattgaagcagagagtggtaaggacagtggcgtttctgccctccgctggcccccagttctccccctttttccgcaggaacccaggagtccaggccccagaccttcatcctgttttcttccaggaagcctccatctcaaaggcaaactcatttttgggggagaaagcgagtgccgggctcctgggtgcccacgcagctgccatcacggcctatgccctgacactgaccaaggcttccggggacctgcggggtgttgcccacaacaacctcatggcaatggcccaggagactggaggtgagggacgaggggctcctggcagtgaatctgaggcccaggggaccttaggatccctgagtgtgtccagagggagaggctggatgaagactcagaggacgaatgaaggtgtaagcaggggtgtgttgggggagaatcaggagaacccagcagggagtgactaagggccaagggaccaggctcttctccctgccctcctgtttacttgtggtttcccttcacttccagataacctgtactggggctcagtcactagttctcagagcaatgccgtgtcgcccacgccagcccctcgcaacccagccgaccccatgccccaggccccagccctgtggattgaaaccacagcctacgccctgctgcacctcctgcttcacgagggcaaagcggagatggcagaccagactgcagcctggctcacccgtcagggcagcttccaagggggattccgcagtacccaagtaggggccgcccccggactctgggggtgggtagtcctgagaacaagcgcttgagtcctgacccaacctccctaggacacggtgattgccctggatgccctgtctgcctactggattgcctcccacaccaccgaggagaggggactcaatgtgactctcagctccacaggccgcagtgggttcaggtcccacgcgctacagctgaacaaccgccagattcgcggcctggaggaggagctgcaggtgaaccactccccggtgaacctctccctcgcggggtagccaggacacctgggcctcgtggccaggtcagaagccatccccaccctcccatccgtggaatccccgcagcacttcttcctggggtccctgggggaagactgacttcctgcctgtgtgacctggagctctgagcttcagttttctcacttggagagtaacatatgcagagtttaccctacagggttgttagaaggctgaagtgagataattcacgtgctggtgtagactttgtggaaatgtgaggtggggagaggaggtggggctgttttgaggaaggagacaagttattggagccgcaaaaataggtttgcttatgcccttctaacatcgccttccctttcctgttgctgaaagttttccttgggcagcaagatcaatgtgaaggtgggaggaaacagcaaaggaaccctgaaggcgagggcctgggaaggggcagggccgggcactggcggaggagacgggtgtgaagtgagaggcctgtgggcagaggcgcatggtccggggaaggaggcagacacctcagggttggcgtcccgtgcttccgtcctgggtgtttttccccctgcttgctctccccgtctctgggtacctgttgtttcctttacctgcctcagtgctgatgccccggatcccactcctcagcccaggcctcttccctcgaccacgggccccactcgtcccactcccgcagcacctcagacgaggcgtgtcccaaagcccttcttcactgtgtgtctcttgtctggctgatgggaacccctgccagccaggagcccggctcctactccagaggccgtgttagtggcccctctcccaagcctgtccttatgtccctagtgacccctcctctgctcccctgctgcctgtggcccttgctgcttgcatccgagattctgtgctaagacgaccttctccctacctggaacttctctttaactcccctgtctgatccactgtccacacggcagtgacactgaccttccacaagccccagccagatcagccttggggaaaagtcacaccccctgcccatggctcacatggctgggcctctgcccacctctccggccagacagatcctgcctacacagatccccgtgcctttcccgtccttccctgcttcttggcccacaggacaaactctttctcctccttcaagccttggccagaagcctttcctgagcttttcagtccagcctcttcccagcacagtctggagtgttggcctctgggggcacgggcctgcttctttacctttctgtctcacccggcacctgtggcaaatctggttccactcgtgagtgtgggctgtgcagtgatgggaatgaaaaggggctgaaggcctcaaatcccgtagcccggggagacgcccttagtatggcaccagagaggtctgtggcctcaaatgtcctgcgtcctctccctgccccttgctgagccaggtccttcgtatctacaatgtcctggacatgaagaacacgacctgccaggacctgcagatagaagtgacagtcaaaggccacgtcgagtacacgagtgagtgtgggggttgggaggcctcggggcctggcaggggctggtgcagggagccaggtggccatcccagccctcctcacaatgcttccctgtgcagtggaagcaaacgaggactatgaggactatgagtacgatgagtttccagccagggacgacccaggtgtccctctgcagcccgtgacacccctgcagctgtttgagggtcggaggaaccgccgcaggagggaggcgcccaaggtggtggaggagcaggagtccagggtgcactacaccgtgtgcatctggtgggcgccgggagctgtcctgggccaggggagggagggcaggacccaggctggggctgggcttctggagcccgcgcaggcagaacctggacgacaggtcacgtctctccacaggcggaacggcaaggtggggctgtctggcatggccatcgcggacatcaccctcctgagtggattccacgccctgcgtgctgacctagagaaggtgtggtcagaccccagggcaaccccctctgccccggtgctgagccctgtcatgtgcagggcctgtgacctgtgaccacctccccttttccacagctgacctccctctctgaccgttacgtgagtcactttgagaccgaggggccccacgtcctgctgtattttgactcggtgagtggggagaggtgacgcaggaagggactcgatggcactgggtgtactgagtgtgcgttaggaggtttctcaggagacagctgtgtcagccgccggtgctcttggggacttgatgtcatcagcgagaaggacgaggatgtgagcctgtgagacacagcagagtaaggggcagacctgcaggtggcaggggccggtgccagtcagcggggaccctcggggcttgagagggatgcttcgtaaagccggttttattcagcttgaggggctgcctttgtttttttgttgaacttcctttttttttttttttaatattaaagcgttttttcttttataaagtgatggtggccatagatgacagctgtatttgtcttttcacggccttatttgactaaaatagttatcaaccctcttatggccttcaaaacatttttatttagttagttattaaagacagggtctcgctctgtcgcccaggctggacttgaactcctggccacaagcgatcctctggcgtaggcctttcaaagtaccgggtttacaggccagagccaccaaacattttgagcccgaccttcaaaatgttttttgaacatttactgtaacctctgggagaaaatgtgagaaaggtgtggtggctttcattagccagctgtttgtcggtcagggagacccttacccagtgtgtgcagaggggccagcccccatcagctggggaagcctggctgacacatctgggctgaacacaatggaaaacacagccagcaagattcccggagagggagctgacggcgcgccagcccagctcaggagagacactggcatggcaccgtgtggactgggcgcgtgggcgtgaggaggggtcaggcctgggacctgagtcgggggggtcaggcaggatgacagaacctgcagttaggttatggccaataaaggaggacccagttgtatccatgacaaagttgaggctgtcaggagggtgagtgggtttgggggcaggcagagtgccttggagaactcacaggtcctgccaaaaccctaatgcagagatggagctgcaagtgcagtttgagaatcatcagcctggagcggtttagtggaaggcagggagtggttgaggcccccacaggggagcactgaggaagcaagttccgaaggagggaacgtaagaaatgaccagctcagaaccaagggtgttccagaagctaacccttagcttagggacagtgtcacagagaacatgtccatgatgcaagactctgctgagggcctggggcggtgaagactggcgcaaggtcaccctctgggaagtgaagtcaccagagaccttgcggagcagcttggagagttctctgagtaggagggtgacagaatgtgaaggacactggagagaaggccaacaggaaccaaacaaaaccaggccaaggaaatccagtatagggggctgcagggcccagggagtgggtccctcatctctcctccccacgctgggccaggtccccacctcccgggagtgcgtgggctttgaggctgtgcaggaagttcccgtggggctggtgcagccggccagcgcagccctgtacgactactacaacccgggtgagcactgcggggcaccctggagttcgggagagctgtggcataggtgccctcctgtgggacagtggacactggggtagtgtggggggcagaaagtgctggggctccctgggactgaggaggcagaacagagggacccgtgccctgactcctctgtgttctccagagcgcagatgttctgtgttttacggggcaccaagtaagagcagactcctggccaccttgtgttctgctgaagtctgccagtgtgctgagggtgagactgagggcctggggcggggcagtggaggcgagatggccggggaccccccacactgtctgatggggcccccgacttcagggaagtgccctcgccagcgtcgcgccctggagcggggtctgcaggacgaggatggctacaggatgaagtttgcctgctactacccccgtgtggagtacggtcagtcttcccaccgaggccctggcctgaccctccctcggggactggctgttttggcctctctgggtgtagcctgcccctcttacaggtcatgcatgcagcctctttgctctgacaccaacttcctgccctctcagcctgaaagtaactcacctttattccttctcctaaccccctcttaggcttccaggtgaaggttctccgagaagacagcagagcggctttccgcctctttgagaccaagatcacccaagtcctgcacttcagtatgaagcgaatcgagaggcgggcagggctgtggggagacagggaggctgaggtctggctgaggacctgaccatctggaagtgtgaaaatcccctcagcgtgtcagaagccctgggcttggccatgaatagggaggcagtggcacctctccgtgggggtggcgaaggtggaatgagaggagctacacagagctgctggcctgggctcgccctgcaccttctcttcctctctgaccacttttgtgcacgtcatccccgcagccaaggatgtcaaggccactgttaatcagacacgcaacttcctggttcgagcgtcttgccgccttcgcttggaacctgggagagaatatttgatcatgggtctggatggggccacctatgacctcgagggacagtgagtcgtctgatcccctcagtctcttatgctccccatgcctcgccacctaggccttgcccttcagaagccagatgcctgtgctctctgttcccaactgccatcctcccgagccctgctgactgcccctttgccccctgcagcccccagtacctgctggactcgaatagctggatcgaggagatgccttctgaacgcctgtgccggagcacccgccagcgggcagcctgcacacagctccacgacttcctccaggagtatggcactcaggggtgccaggtgtgagggctgccctcccgcctcccccgggaggaacctgagcctgggaaccatgaagctggaagcactgctgtctccgctttcctgaacacagcctgggaccagggcatattaaaggtttttggcagcaaagcgtcagtgt

SEQ ID NO: 6 - DNA, 20658 bp, Homo sapiens; identical to SEQ ID NO: 3
  source 1..20658: mol_type = other DNA

SEQ ID NO: 7 - DNA, 20605 bp, Homo sapiens
  source 1..20605: mol_type = other DNA
gacagacagacggatctaacctctcttggatcctccagccatgaggctgctctgggggctgatctgggcatccagcttcttcaccttatctctgcagaagcccaggtcctggaggcgggatgctgggtgcttggattggggcagggctggcatcgggacccgattcaggagtgagggagagcaggggtggaggtgtcagagcgaagtctgactgctgatcctgtctgttctccccaggttgctcttgttctctccttctgtggttcatctgggggtccccctatcggtgggggtgcagctccaggatgtgccccgaggacaggtagtgaaaggatcagtgttcctgagaaacccatctcgtaataatgtcccctgctccccaaaggtggacttcacccttagctcagaaagagacttcgcactcctcagtctccaggtaaccagaccccatgccctcctgctgcttgtgggggcctcctgccctgttcccatctgtcttgtaagtgtcatcatcttcccactggcctcctcccctcctgtcttcccaccctggcattctccttccacgtttctcccttggtctctgtcctttttggtcagctgtctcttgctctgtgacccgctccctctccctctccctctcctgacaggtgcccttgaaagatgcgaagagctgtggcctccatcaactcctcagaggccctgaggtccagctggtggcccattcgccatggctaaaggactctctgtccagaacgacaaacatccagggtatcaacctgctcttctcctctcgccgggggcacctctttttgcagacggaccagcccatttacaaccctggccagcggggtgagtctcagccccagggcctcaacctttaaccccctccgagccctctcaggatgagtttggtgccccctaagtgagataacctgaaagaaagtgccacacagaaggggtgcttaggaaacatttgtcccctgctccctctgtggagtttgacccaccctccccttgcacatggacccctgctcacctctctcctcctccactcccagttcggtaccgggtctttgctctggatcagaagatgcgcccgagcactgacaccatcacagtcatggtggaggtgagtccccgacctctggccttcctgatcctggccactgatgtgacctcctgcctgtgagcacttctccccttgcagaactctcacggcctccgcgtgcggaagaaggaggtgtacatgccctcgtccatcttccaggatgactttgtgatcccagacatctcagagtgagcgctcccaatgtgggggctgcccccaagctacaccaccccaattcctgttaggctctccacctcccacacagaggcacgtccccagatgccctgaccctcagcctcctgagcctctggttaacccccacagtcctcttcccagggaagcaggctgctggctctccgtgccccactgtacagatgggctgagccccttccttgtccattctcaggccagggacctggaagatctcagcccgattctcagatggcctggaatccaacagcagcacccagtttgaggtgaagaaatatggtgagagctggaaactggagggacaggcagctgctttcctgaaggaaataagggtggaaggagaggtactgggagcagctcagggcagggagatatgggtgccacagccctgagcagaggggagtctttgagctggagtctgacctgcctatcccttcaccctgggtcagtccttcccaactttgaggtgaagatcacccctggaaagccctacatcctgacggtgccaggccatcttgatgaaatgcagttagacatccaggccaggtaatacctccctccccacctctgcccaccagcaccgggtcctgctccctactcagtatgaatgggctcctgcttccctgccctcgggccattattccccccagcccttggcccaccctcttctctctgccacgacaggtacatctatgggaagccagtgcagggggtggcatatgtgcgctttgggctcctagatgaggatggtaagaagactttctttcgggggctggagagtcagaccaaggtaggaaggagaataggggctggggaggggaaggggcaagggaggtgaggtgggagactcagtctcaccctatgtcctgtttctttctatgccccagctggtgaatggacagagccacatttccctctcaaaggcagagttccaggacgccctggagaagctgaatatgggcattactgacctccaggggctgcgcctctacgttgctgcagccatcattgagtctccaggtgggtgactttcccttattgtaaccccagacccttgcctctgacctctgagctaaccctctgtcctccggcaccaacaccaccccacttctcacatctcatctcagactcaaaaccaggaaacacccaggagacctggtttctctccaactctgtctctgtgactcggcccttttccctggctgagtttatttatttctttgctcgttctgctcattccttcactcctccagtggacatgtgttgttcaatgccccgtgctaggcctcagcatgcacagacatgttggggaccagcctcaacgccacccgtagggttcctgaagtccattggtgacacaggaatgagaagagacaggttaagagttcataaagagtgggggccagggggccaattgcaaaatggaggctgcaaaaggctcagagctctggtctccacactattttttgagtacagtcactcagatctaagaagcagatgttcagggagaaacagtgaaagggaggcagtgggtcataggcgtaatctatagcaatagagttttaaatgaatctcctttgtgctcaaacagcatgtctttaaattatcggagagtagctggtggaagtgggcttagctagaagactgcatgtctgtccaatgcttcaaaggagggtctttctccttgaacagagtgtttacagataagacagggggtctcactctgagcatgggaacatgatggcaattaggaggcttttcttctcagaggcctcttgtggctttccacaacttattgtctcatatttttatggacagtttatacaggcaccccacaagtccttttcccaacatgcccccctccctttttttttttttaaccgctattgctattatggcttatttgtggtgtttggtctgttttcagaagtgtcttttgcatctgtagactaaaagtaaacagcataaacagatacacattaaagtaaaatttgtaatagttgatcctttaatggtcttaatctgtttaagaggatttatgtttgaaagtccgtcagtagctccaatgagaatgtcagtctcaggcaggagggttaaatgagcctgagatgctttaaaaacctgtttttttaaaatttggttatatttaatgttaaatttttatttttttcttttagatgatgtctaactttttaaaaatgatgtttagtagtattatacgaatggggagttatgtagaaattggaagtatttcaattacattgtacttctaattgatgttttaagtttattgtacgatcttccatttaaataacagtctgtctaagatcatttgtttgatttgtcaattgttggtctatttgggtctgagaattccacaattttgaggaattttttgttaactatttatatattttgtagtttgaacagaggagtgtaaagcaattccagcagccgcagcagtagctgtgactgcaataaggcccataagactgttataagggtaaaaataaatctctttgttttggtaaacacttttttttaaaacatttttgtgacaatatgaatggaaggagaggctttctaaggtctattgagggaaaccagtatccaaactcctttcttagtttttatcagtaacacagatgtttttacaccgaacgtggaattaatacaggtgaaaaggtgacagttttgacaagtaatagtttgagaattaggtcgaatgtcaatatttttgaccattaacataaaaggagggttgacacaactctgaatgggcactgttttgttggaagaaaactgatacgcaaattgaagtttttaaccttttttttttaaagataatatatttttttctaaacttaaatatgagattgggccattattaactttcataatttggagtgtttagggcctattattggattaattattttgggatgtgggccagctgtactaaaattggtccaaattatgggaaaatgagcacgtttttcagtgtaagtagtgttacctttttgatagtatagtttctgttttagttttgtcttgtatttattattttgatgggtacaattaactgtaaaggtcccctcaggggaccaattaatgacaatttcataggaattattttgtagtaccatagtgtgatcagagatgtaattttttttaattaatatttttaaattatttgaccattgttaaggttgttggcacctcttttttgggggcttaaactgttaattgaattgaactctgtgaatgatccgggctccatccagaaaataaatgataggatactggtctttgattatgacctggaattttaactagtcaatgttgtcggtagccttttaggcaaccgatagttggccttatgtaaagaggggggaactgataacctatggacacatttattaacttttttttttttcctttgggtgagagggcccatgagtatttgtaggcttagggatccaaacgctattattaacataaacttcaactgggggttttaaccatgtgacaggcctaattaaaggcaggaatgggacacatgcccaataggtataattttgggctgttgtagccacaggtttgttaggcgaggaggtcactgtttttattttggctttgtattctaggattagtaaataacagaagacaaacatgagtataattagtaacttttttttttagtaaaagagtgacctgtagtgttacttggcatcttagtttactatatgttattaatgaggaaccccactgggggtatgttaatttattctagctaagcagttatgttattagaagctgagaagggggtgtttgttaaagtaacagggcagaagaaaggcggatttaagatacgagcttaatacagtgtagcaggtataggtagtaggcaaagtgagagaattaaaaatgaataaattatttggcttagacttttgtttttttagtataatgtctgaggcctgtgttgtttgtggaagtcgcattgttgaggctgtagttcctgtagggtcttttttaggctggttcaaatgtttttttattttttaattttttatcctttgatgaggatgtagtctttaggctggtactggaaattttaggagtggcgtctgtgttaagagactttttacaatttttaaagagcaggttagtgttttaagaaaaacttgtgttttattttaatgtttagtttatagaaaactggatgatatctttttaactttagtaaatacgtttacacacggaattttttacaattatcattttaaaacttgtttagatctttaaaacaaaattaaacaaccttttttgtataaattttttataactttttttatgacttttacagacaatttttaacatgtcttaactttttatgttttataatttttttactaaaggtacatttttataactttttaaatttttttacttttttgtatttttttgatttttgtcttagtcttttttttacttttatttttttaaatgtgtaataattagatgagtgttggtaacaatggatgtatgtacatattttagtttttaaaatttagggatgtgtttaacatctgtttgccagaactgactaggttccaattctttacggttaacacctattgaaggagggtatgtgcctgtgagctggtaatctgggcattgtgggataatttgtttagccagcctctgtgtaagttgaaattatttagataagtttctccaattttggtggaataatcgatgtgattgggtggcttggtcaagcagtgatgtcataacctgaaggtctgcttgattattgccgtaagccaatgggccaggcagagagctgtgggctcgaatgtgtgtaataaaagtaggatgtgtaccttggtctagtaattgttgaagttgaagaaaaagaccacacagagtgggctccagagcaaacttaaggctgtaatagtttttaaataaatacacagaataaccttagctctctgaatgttagtaaattcagatcaagtgattggattatgtggtctccaccagactgttgctttttcatgtttaccagacccaccagtaaaaacagctatggctccttccaaaggggcatcacaagtaatttttggaagaacctatgtagttaattttaagaattgaaaagtttttaggataatgattattaatacatccaacaaattttgttaaattaatctgtcatgtaactgagttaataaatgcctgtttaacctgatttttatttattggaactataatttttattgggctcagtgccacaaaatttaataattcatatatgagcctgtccaattagaattgccatctgatttaagtatactgtaagtgcttttatggtattatgtggcaaaaaggaccatttaactaaatcatcattttgaacaataacccccattattgtgtggttagtgtgaagtagggaacacaatgaattataaaggcaagtctgagtcaatcctactgacctgggcttgctgaattttgttttcaattactgataactctttcatggcctcgggtgttagttctctgttactgcgtaagttggtatttcccctcaatattgagaagagattagacatagcataagtaggaattgctaaattgggccaaatccaattaatatcttctaacaatttttgaaaattatttaaggttttgaaagaatctcttctaatttgaaccttttgaggcttaatggctctatcctgtacttgtattttcaaatactgaaaaggagtggttgtttgaattttgtcaggtgctataagtaattcagcatttgtaattgtcttttgcaaagattaataatattgaataagttggtctctactttttgctgcacaaatctggaaactgatctctaacaggctggatagttctgcctacaaaagtttgacaaactgtgggactatttaacataccctggggcaaaactttccaatgatatttggctgcaggttttttgttattaacggcaggaatggtaaaggcaaattttttgaaatctgcctctgctaaaggaattgtaaaaaagcagtcttttaaatctataataacaagcggtcagtctttagggagcacagtgggggatgggagcccaggttgtaaggctcccatcggttgaattacagcgttgacgccatctaccggactttttcttaattacaaatactggggaattccaaggagagaaagtgggtgaaatatatcctttttttagtagtttattttataaagcacccccaacttttccttagggagcggccactgttcaacccagacggggcgccgggtcatccattttaagggaaattgctccttcactgtaataactgtagggtgaacctgaattgccccatctccataatgaactgtgggtcgggcaataatgggcacggtgagccaagtctcgggctccctccccctgcacccactcggctgaggaggaggtggccattctggacatttctctacaggaaccgtgggctgaacaattttttgagtaggtttagggagactggggagattggcataaatcatcttcagactctcctttttgttagtactcggtagaggtggttcagagttctgattatcaaactcctctctctcctcctctgactcagcctcattatctgtctgaaaaggctccagtgctgcatgcaccaatgaccaaagcgaccaaacaggcaaaggaatttcctttccttctctatatgctcttttaaggtcctttccaactccttcttaatgttttaatttcaaagtttcctgttttgggaaccaagggcaaaattgttccatagcatgaaacaaatccataagattttccgtatcaacttttaccccaccatgcatgcttgaagagctgccgtaggaagctcaaatacgtggtgtacttactttcagtttttcccattgtgtccctagctttctctgggcgccccgcttacctgtagaggttaaaacttttatgtccttgggagtcctttgttcgttggtcctctgtttcacatgcttgagcgtttcctcaccagattcttttgggccccacgttgggcgccagaatgttggggaccagcctcaacaccacctgtagggtacctgaagtctggtggtgacaaaggaatgagaagagacaggttaagagttcataaagagtggaggccagggggccaattgcaaaatggaggctgcaaaaggctcagagctctggtctccacactatttattgagtacaataacttagatctaagaagcagatgttcagggcaaaacagtgaaagggtagcagtgcgtcacaggcataatctacagcagaagcgctttaaatgaatctcctttgtgctcaaacagcatatctttaacttatcggagagtagctagtgggagtgggcttaactaggagcctgcacgtctgtccacattccaatgcttcaaaggagggtctttctccttgaatacagtgtttacagataagagagagcaggtctcgctctgagcatggcaattaggaggcttttctcctcagaggcctcttgtggctttccacaacttattgtcccatatttttatggccagtttatacaggcaccccacaagtccttttcccaacacagacaggaatacggcagcctgtgccctgggagctcactgtcttgtgggagggaaccactcaagccactccccacttgtcctcctgtccctctcttcttgggctctgtcccccacctctctctgtcctttgtcttgcaggtggggagatggaggaggcagagctcacatcctggtattttgtgtcatctcccttctccttggatcttagcaagaccaagcgacaccttgtgcctggggcccccttcctgctgcaggtttcttccagaggggaaggatgagtagggaggatgtggtagttaggagggctcagggtctgaccactctcttttgcctgccctcctttacctgcctaggccttggtccgtgagatgtcaggctccccagcttctggcattcctgtcaaagtttctgccacggtgtcttctcctgggtctgttcctgaagtccaggacattcagcaaaacacagacgggagcggccaagtcagcattccaataattatccctcagaccatctcagagctgcagctctcagtaggactcctcggacccctgggagatggtgggggaaggggaggagggtgagctggggtcccaaggatccatggcctgacttggggggaaggtggggtacttggctctgagctactaccctattcgcacctgaccccctctccaggtatctgcaggctccccacatccagcgatagccaggctcactgtggcagccccaccttcaggaggccccgggtttctgtctattgagcggccggattctcgacctcctcgtgttggggacactctgaacctgaacttgcgagccgtgggcagtggggccaccttttctcattactactacatggtgtgcatgagctggggagtcacggagggctggggtgcagggaagagccctctgggtggggctgggggggttcaaggctgaggctgtcccatgaagaggcaaccactcttgtccctcccattcttggcccagatcctatcccgagggcagatcgtgttcatgaatcgagagcccaagaggaccctgacctcggtctcggtgtttgtggaccatcacctggcaccctccttctactttgtggccttctactaccatggagaccacccagtggccaactccctgcgagtggatgtccaggctggggcctgcgagggcaaggtgaccggggtcaggagagatggcacttgtgccgagggggttgaggacagggtgattgccaacagggcatggatttagcttgggggcagtgaggataccgggactgaaggaagctctcccactctgaccgcccccacctgccgcccctgccagctggagctcagcgtggacggtgccaagcagtaccggaacggggagtccgtgaagctccacttagaaaccgactccctagccctggtggcgctgggagccttggacacagctctgtatgctgcaggcagcaagtcccacaagcccctcaacatgggcaaggtttgtccagaccctctccacagctctctcacccctccatggctcatccccctgcttccctgagccttgggcgcagcccctggatcccactgaggctccccacagtctcttccccacttggccctgtggtctccatctcctggctctgtatcctttcctatccccccatgtgctgccctctcacctgtgccgagtgctcagtcctgcccctcagccacacttggctcctagcattcctgcctttcttgcaggtctttgaagctatgaacagctatgacctcggctgtggtcctgggggtggggacagtgcccttcaggtgttccaggcagcgggcctggccttttctgatggagaccagtggaccttatccagaaagagtgagaacagagaaggaaggggagtgggtggcgggaagataaggaaggaggaagggcctgaggggaccagctggaagagtccgggcaggaagggctgggcaggggaaggggaggaggggaggaggccgagtgcctgacggctggactgcagcctttctctctaccaggactaagctgtcccaaggagaagacaacccggaaaaagagaaacgtgaacttccaaaaggcgattaatgagaaatgtgagttgcgggtgcctaggcagtagcttgggctctccacctgggatccgggttgggggtctgcctctctgcccctcggctccttgctgaacccacgtgtggtatttggggccagagatccgaattccgggattacgagtggaaggtgggcagctctctccagcagcctctcttatgttgctggtctcaaggggtcggggcgggggctgaggtgtatgtcctttttgtcctctcatgctcacccccacctggccctgcagtgggtcagtatgcttccccgacagccaagcgctgctgccaggatggggtgacacgtctgcccatgatgcgttcctgcgagcagcgggcagcccgcgtgcagcagccggactgccgggagcccttcctgtcctgctgccaatttgctgagagtctgcgcaagaagagcagggacaagggccaggcgggcctccaacgaggtgaggggctgggtggggctagggcacaggtggcggcgcttggaaaggcagaacggtcccctcctcactcccgtccaccgtggtcccccagccctggagatcctgcaggaggaggacctgattgatgaggatgacattcccgtgcgcagcttcttcccagagaactggctctggagagtggaaacagtggaccgctttcaaatgtgagagtgtgtgccggcccggccttttctctgtgctgtgtctcggggccagccggggtagacgggccttctctgcctttccctacacagattgacactgtggctccccgactctctgaccacgtgggagatccatggcctgagcctgtccaaaaccaaaggtgatgtcaccctgtctgggcctcaggtgaccctgcttccatttccctgtaccccagctccctgttccctttgctcttagtgtaggaagagggtccagtgatctggggaggtctgtgccagcgtgcagctggcgtgggccagagggcagaggcggactgagacagagctgggtcacccccacccctccctcctgtggccctgaagctttgatggcccctctgatctctgcccctgtgcccacgcttcctttccctcaggcctatgtgtggccaccccagtccagctccgggtgttccgcgagttccacctgcacctccgcctgcccatgtctgtccgccgctttgagcagctggagctgcggcctgtcctctataactacctggataaaaacctgactgtgaggccccataggagcctgagcatacaggagttgggggagccagggcccagtgaggggtggggaggctaaccgggccaggactctggccatcctcgttttcctgccctcaggtgagcgtccacgtgtccccagtggaggggctgtgcctggctgggggcggagggctggcccagcaggtgctggtgcctgcgggctctgcccggcctgttgccttctctgtggtgcccacggcagccgccgctgtgtctctgaaggtggtggctcgagggtccttcgaattccctgtgggagatgcggtgtccaaggttctgcagattgaggtgaatggagcacccctgaatataagtccccgggcccccagctttgtcctccaccctcagcactctctctgctggccaggccaggggcccaacacccaaaccaatgccttggtctgttcccatcttctacaattctgatccaactctgtccctggagttgaaactcaaagttctgggggagtctgcgctagcagggcaggctgtagtcctgtgtgacctcacaaccatgttttccctgagacagaaggaaggggccatccatagagaggagctggtctatgaactcaaccccttgggtgagtgaccctctacctccagccattggtttcctaagtgggtacaggtggtgggggatgtggacagcaggacaggctgccaacttcccccatttccccagaccaccgaggccggaccttggaaatacctggcaactctgatcccaatatgatccctgatggggactttaacagctacgtcagggttacaggtgggagtgccctttagtcccttcccagtggccaccttcggattcatgtgggacttgtggatccctgcttggtcccactccccgtgagcctctgacacagagtcctcagacctccaccctctccctcccatgtagcctcagatccattggacactttaggctctgagggggccttgtcaccaggaggcgtggcctccctcttgaggcttcctcgaggctgtggggagcaaaccatgatctacttggctccgacactggctgcttcccgctacctggacaagacagagcagtggagcacactgcctcccgagaccaaggaccacgccgtggatctgatccagaaaggttctgggtgcaagggcaagcaggaggggggccaggaaaggacagttactggaagatggacagcccaggaggctacagagggaaagaaagggggcccctgatgaggatggggagcatggccttgggctcaaacagcagaagggtgagtgtcacctgagcggccacctctcctctccaaggctacatgcggatccagcagtttcggaaggcggatggttcctatgcggcttggttgtcacgggacagcagcacctggtgagcttgggagagtggttccagggttctgagggggtcagggctggggcaggggtgggacagagctggtatgatgggagggtggataaccaggcacctgggggcgtgggcataatgagaagcaagtccttatccccaaccctcctttcctgccctccaggctcacagcctttgtgttgaaggtcctgagtttggcccaggagcaggtaggaggctcgcctgagaaactgcaggagacatctaactggcttctgtcccagcagcaggctgacggctcgttccaggacccctgtccagtgttagacaggagcatgcaggtgcgggcatgctggggctggcccgagaagcgcctgtcggaggactctctttgccccttccccctcctgtttgacatcttttctccccttactaggggggtttggtgggcaatgatgagactgtggcactcacagcctttgtgaccatcgcccttcatcatgggctggccgtcttccaggatgagggtgcagagccattgaagcagagagtggtaagttcagtggcgtttctgccctctgctggcccccagctctctccctttttcctcaggaacccaggggtccaggcccaagaccctcctcccgttttcttccaggaagcctccatctcaaaggcaaactcatttttgggggagaaagcaagtgctgggctcctgggtgcccacgcagctgccatcacggcctatgccctgacactgaccaaggcgcctgtggacctgctcggtgttgcccacaacaacctcatggcaatggcccaggagactggaggtgaggggtgaggcgctcctggcagtgagcctgaggcccaggggaccttaggatccctgagtgtgcccagagggagaggctggatgaagactcagaggaggaatgaagttataagcaggggtgggttgggggagactcaggagagcccagcagggggtggctaagggccaggggaccaggctcttctccctgccttcctgtttactcgtggtctcccttcactttcagataacctgtactggggctcagtcactggttctcagagcaatgccgtgtcgcccaccccggctcctcgcaacccatccgaccccatgccccaggccccagccctgtggattgaaaccacagcctacgccctgctgcacctcctgcttcacgagggcaaagcagagatggcagaccaggcttcggcctggctcacccgtcagggcagcttccaagggggattccgcagtacccaagtaggggccgtccccgggctctggcgggggtgggtagtcctcagaccaagggcttgcttgagtcctggctcaacctccctaggacacggtgattgccctggatgccctgtctgcctactggattgcctcccacaccactgaggagaggggtctcaatgtgactctcagctccacaggccggaatgggttcaagtcccacgcgctgcagctgaacaaccgccagattcgcggcctggaggaggagctgcaggtgaaccactccctggtgaaccactccctcgcctgggtagccaggacacctgggcctcgtggccaggccagaagccgtccccaccctcccacccgtggaatccccgcagcacttcttcctggggtcttcgggggaagactgacttcctggctgtgtgacctggagctctgagcttcagttttctcacttgtagagtaacatacacagagttcaccctacagggtcgttagaaggctgaagtgagataattcatgtgctggtataaactttgtggaaatgtgaggtggggagaggaggtggggctgttttgaggaaggagataagttattggagccgcaaaaacaggtttgcttgtgcccttctaacatcgccttcccttttctgttgctgaagttttccttgggcagcaagatcaatgtgaaggtgggaggaaacagcaaaggaaccctgaaggtgagggccagggaaggggtggggccaggcactggtggaggagagggtgtggagtgagaggcctgtgggcagaggcacatggtccggggaaggaggcagacacctcagggttggtgtcccgtgcttccgtcctgggtgtttttccccctgcttgctttcgcttgctctccccatctctgggtacctgttgtttcctttacccgcctcagtgctggtggctccgaatcccactcctcagcccaggcctcttccctgaaccatgggccccactcgtcccactcccacagcacctcagacgaggcatgtcccaaagcccttcttcattctgtgtctcttgtctggctggtgggagcccctcccagccaggagcccagccactactctagaggccgtgttagtggcccctctcccaagcctgtccttatgtccctagtgactcctcctctgctcccctgctgcctgtggcccttggtgctgcatcctagattctgtgctgagacggccttctccctacctggaacttctctctacctcctgtctcccctgtctgatccactgtccacacggcagtgacactgaccttccaaaagccccagccagatcagccttggggaaaagtcactccccgctgcccacggctcagatggctgggcctctgcccacccctccggccagacagctctccttgtctacacagatccccttgcctttcctgtccttccctgcttcttggcccacaggacaagctctttcttctccttcaagccttggccagaagcctttcctgagcttttcagtccagcctcttcccagcacagtctggagtgttggcctctgggggcaggcccctgcttctttacctctctgtctcgcctgacgcctgtggcgaatgtggtgccactcgtgtgtgtggactgtgcagtgacggggaggaaaaggggctgaaggcctcaaatcctgtagcccagggagatgcccttaggtatggcaccagagaggtctgtggcctcacatgtcccacgtcctctccctgccccttgctgagccaggtccttcgtacctacaatgtcctggacatgaagaacacgacctgccaggacctacagatagaagtgacagtcaaaggccacgtcgagtacacgagtgagtgtgggggttgggaggccttggggccaggcaggggctggcgcagggagccgggtggccatcccagccctcctcacaatgcttccctgtgcagtggaagcaaacgaggactatgaggactatgagtacgatgagcttccagccaaggatgacccagatgcccctctgcagcccgtgacacccctgcagctgtttgagggtcggaggaaccgccgcaggagggaggcgcccaaggtggtggaggagcaggagtccagggtgcactacaccgtgtgcatctggtgggcgccgggagctgccctgggccaggggagggagggcaggacccaggctggggctgggcttctggagcccgcgcaggcagaacctggacgacagctcacacgtctccacaggcggaacggcaaggtggggctgtctggcatggccatcgcggacgtcaccctcctgagtggattccacgccctgcgtgctgacctggagaaggtgtggtcagccacccagggcaaccccctctgtcccaggtactgagccctgtcatgtgcagggcctgtgaccaactccccttttccacagctgacctccctctctgaccgttacgtgagtcactttgagaccgaggggccccacgtcctgctgtattttgactcggtgagtggggagagatgaggcaggaagggactcgatggcaccgggtttactgagtatgcgttaggaggtttctcaggagacagctgtgtcagcggctggtgctcttgagaacttgtgatgtcatcagagagaaggacaagaatgtgagcccgtgagacacagcagagtaaggggcagacctgcaggcggcagggaccgatgccagtcagcagggaccctcagggtttgagagggagtctttcctaatgctggttttattcagcttgaggggctgcctttgtttttttgttgaacttcctatcttttttttaatattaaagcgtattttcctttacaaagtgatggtggccatagatgatagttgtatttgtcttttcacgaccttatttggctaaaatagttatcaaccctcttacggctctcaaaacatttttatttatttatttagtaaagacagggtctcgctctgttgcccaggctggtcttgaactcccggcctcaagcgatcctctggcctaggcctttcaaagtaccggatttacaggccagagccaccatgcccggccttcaaaaaaagttttggaacatttactgtaacctctgggagaaaatgtgagaaaggtgtggtggctgtcattagccagctgtttgtaggtcagggagacccctacccagtgtgtgcagaggggccagcccccatcagctggggaagcctggctgacacatctgggttgaacacaatagaaaacacagagccaacaagattcccggatagggagctgacggtgcagcagcctagctcaggagggacactggcacggcaccgtgtggactgggcccgcgtgggcacgaggaggggtcaggcctgggacctgagtcggggggtcaggcaggatgacagaacctgcagttaggttgtggcaaataaaggaggacccagttgtatccatgacaaagatgaggccgcgaggagggcgagtgggtttgggggcaggcagagtgccttggagaacttacaggtcctgccacaatcctaatgcaaggatggagctgcaagttcagtttgggaatcatcagcctggattggtttggtggaagccagggagtggttgagacccccacaggggagctctgaggaaggaagttccgaaggagggaacgtaagaaatgaccaggtcagaaccaagggtggtccagaagctaacccttagcttagggacagtttcacagagaacacgtccatgatgcaagactctgctgagggcctggagcagtgaagactggggcaaggtcaccctctgggaagtgaagtcaccagagaccttgcggagcagctttgagagttctctgagtaggaaggtaacagaatgtgaaggacactggagagaaggccaataggaagcaaacaaaaacaggccaaggaaacccagtacagggggctgcagggcccagggagtgggtccctcatctctcctccccacgcttggccaggtccccacctcccgggagtgcgtgggctttgaggctgtgcaggaagtgccggtggggctggtgcagccggccagcgcaaccctgtacgactactacaaccccggtgagcactgcaggacaccctgaaattcaggagaactttggcataggtgccctcctatgggacaatggacaccggggtagtgagggggcagagagccctggggctccctgggactgaggaggcagaatggaggggcctgtgccctaactcctctctgttctccagagcgcagatgttctgtgttttacggggcaccaagtaagagcagactcttggccaccttgtgttctgctgaagtctgccagtgtgctgagggtgagactgagggcctggggcggggcagtggaggcgggatggccggggccccccccacactgtctgatgggttccccaacttcagggaagtgccctcgccagcgtcgcgccctggagcggggtctgcaggacgaggatggctacaggatgaagtttgcctgctactacccccgtgtggagtacggtcagtcttcccaccgaggccctggcctgaccctccctcggggaccggccgttttggtctctctgggtgtagcctgctcctcttacaggtcatgcacgcagcctgtttgctctgacaccaacttcctaccctctcagcctcaaagtaactcacctttcccccttctcctcaccccctcttaggcttccaggttaaggttctccgagaagacagcagagctgctttccgcctctttgagaccaagatcacccaagtcctgcacttcagtatgaagcaaaccggagaggcgggcagggctggggggagacagggaggctgaggtgtggccgaggacctgaccatctggaagtgtgaaaatccccttgggctgtcagaagccttgggcttggccataaatagggaggcagtggcacctctccatgggggtggcgaaggtggaatgagaggatctacacagagtccccagcctgggctcaccctgcaccttctcttcccctctgaccacttttgcgcacgtcatccccgcagccaaggatgtcaaggccgctgctaatcagatgcgcaacttcctggttcgagcctcctgccgccttcgcttggaacctgggaaagaatatttgatcatgggtctggatggggccacctatgacctcgagggacagtgagtcatctggtcccctcagtctcttgtcctccccatgcctcgccacctaggccttgcccctcagaagccagatgcctgtgctctccgtttccacctgccatcctcccgagccctgctgactgcccctttgccccctgcagcccccagtacctgctggactcgaatagctggatcgaggagatgccctctgaacgcctgtgccggagcacccgccagcgggcagcctgtgcccagctcaacgacttcctccaggagtatggcactcaggggtgccaggtgtgagggctgccctcccacctccgctgggaggaacctgaacctgggaaccatgaagctggaagcactgctgtgtccgctttcatgaacacagcctgggaccagggcatattaaaggcttttggcagcaaagtgtca

SEQ ID NO: 8-41 - skipped (34 entries)

SEQ ID NO: 42 - DNA, 17 bp, synthetic construct
  misc_feature 1..17: note = Synthetic oligonucleotide
  source 1..17: mol_type = other DNA
ccaaattaaccacagaa

SEQ ID NO: 43 - DNA, 18 bp, synthetic construct
  misc_feature 1..18: note = Synthetic oligonucleotide
  source 1..18: mol_type = other DNA
gtccccaaattaaccaca

SEQ ID NO: 44 - DNA, 17 bp, synthetic construct
  misc_feature 1..17: note = Synthetic oligonucleotide
  source 1..17: mol_type = other DNA
gtccccaaattaaccac

SEQ ID NO: 45 - DNA, 17 bp, synthetic construct
  misc_feature 1..17: note = Synthetic oligonucleotide
  source 1..17: mol_type = other DNA
tgatccttttacctcct

SEQ ID NO: 46 - DNA, 17 bp, synthetic construct
  misc_feature 1..17: note = Synthetic oligonucleotide
  source 1..17: mol_type = other DNA
actgatccttttacctc

SEQ ID NO: 47 - DNA, 18 bp, synthetic construct
  misc_feature 1..18: note = Synthetic oligonucleotide
  source 1..18: mol_type = other DNA
cactgatccttttacctc

SEQ ID NO: 48 - DNA, 18 bp, synthetic construct
  misc_feature 1..18: note = Synthetic oligonucleotide
  source 1..18: mol_type = other DNA
acactgatccttttacct

SEQ ID NO: 49 - DNA, 17 bp, synthetic construct
  misc_feature 1..17: note = Synthetic oligonucleotide
  source 1..17: mol_type = other DNA
cactgatccttttacct

SEQ ID NO: 50 - DNA, 19 bp, synthetic construct
  misc_feature 1..19: note = Synthetic oligonucleotide
  source 1..19: mol_type = other DNA
aacactgatccttttacct

SEQ ID NO: 51 - DNA, 16 bp, synthetic construct
  misc_feature 1..16: note = Synthetic oligonucleotide
  source 1..16: mol_type = other DNA
cactgatccttttacc

SEQ ID NO: 52 - DNA, 18 bp, synthetic construct
  misc_feature 1..18: note = Synthetic oligonucleotide
  source 1..18: mol_type = other DNA
aacactgatccttttacc

SEQ ID NO: 53 - DNA, 17 bp, synthetic construct
  misc_feature 1..17: note = Synthetic oligonucleotide
  source 1..17: mol_type = other DNA
acactgatccttttacc

SEQ ID NO: 54 - DNA, 17 bp, synthetic construct
  misc_feature 1..17: note = Synthetic oligonucleotide
  source 1..17: mol_type = other DNA
agcacaaagtcatctcc

SEQ ID NO: 55 - DNA, 16 bp, synthetic construct
  misc_feature 1..16: note = Synthetic oligonucleotide
  source 1..16: mol_type = other DNA
tcacataacaagctcc

SEQ ID NO: 56 - DNA, 17 bp, synthetic construct
  misc_feature 1..17: note = Synthetic oligonucleotide
  source 1..17: mol_type = other DNA
cctatgtcacataacaa

SEQ ID NO: 57 - DNA, 17 bp, synthetic construct
  misc_feature 1..17: note = Synthetic oligonucleotide
  source 1..17: mol_type = other DNA
gcctatgtcacataaca

SEQ ID NO: 58 - DNA, 17 bp, synthetic construct
  misc_feature 1..17: note = Synthetic oligonucleotide
  source 1..17: mol_type = other DNA
agcctatgtcacataac

SEQ ID NO: 59 - DNA, 21 bp, synthetic construct
  misc_feature 1..21: note = Synthetic oligonucleotide
  source 1..21: mol_type = other DNA
agcaaaactaaacaataaaac

SEQ ID NO: 60 - DNA, 19 bp, synthetic construct
  misc_feature 1..19: note = Synthetic oligonucleotide
  source 1..19: mol_type = other DNA
agcaaaactaaacaataaa

SEQ ID NO: 61 - DNA, 16 bp, synthetic construct
  misc_feature 1..16: note = Synthetic oligonucleotide
  source 1..16: mol_type = other DNA
aatctaggttacaccc

SEQ ID NO: 62 - DNA, 15 bp, synthetic construct
  misc_feature 1..15: note = Synthetic oligonucleotide
  source 1..15: mol_type = other DNA
ccgataacgaactaa

SEQ ID NO: 63 - DNA, 15 bp, synthetic construct
  misc_feature 1..15: note = Synthetic oligonucleotide
  source 1..15: mol_type = other DNA
acccgataacgaact

SEQ ID NO: 64 - DNA, 15 bp, synthetic construct
  misc_feature 1..15: note = Synthetic oligonucleotide
  source 1..15: mol_type = other DNA
cgcatcttttgatcc

SEQ ID NO: 65 - DNA, 19 bp, synthetic construct
  misc_feature 1..19: note = Synthetic oligonucleotide
  source 1..19: mol_type = other DNA
aagtaaatatctccttctt

SEQ ID NO: 66 - DNA, 18 bp, synthetic construct
  misc_feature 1..18: note = Synthetic oligonucleotide
  source 1..18: mol_type = other DNA
aagtaaatatctccttct

SEQ ID NO: 67 - DNA, 17 bp, synthetic construct
  misc_feature 1..17: note = Synthetic oligonucleotide
  source 1..17: mol_type = other DNA
aagtaaatatctccttc

SEQ ID NO: 68 - DNA, 18 bp, synthetic construct
  misc_feature 1..18: note = Synthetic oligonucleotide
  source 1..18: mol_type = other DNA
gaagtaaatatctccttc

SEQ ID NO: 69 - DNA, 17 bp, synthetic construct
  misc_feature 1..17: note = Synthetic oligonucleotide
  source 1..17: mol_type = other DNA
acccatagacaacttta

SEQ ID NO: 70 - DNA, 18 bp, synthetic construct
  misc_feature 1..18: note = Synthetic oligonucleotide
  source 1..18: mol_type = other DNA
cacccatagacaacttta

SEQ ID NO: 71 - DNA, 17 bp, synthetic construct
  misc_feature 1..17: note = Synthetic oligonucleotide
  source 1..17: mol_type = other DNA
cacccatagacaacttt

SEQ ID NO: 72 - DNA, 17 bp, synthetic construct
  misc_feature 1..17: note = Synthetic oligonucleotide
  source 1..17: mol_type = other DNA
ccacccatagacaactt

SEQ ID NO: 73 - DNA, 16 bp, synthetic construct
  misc_feature 1..16: note = Synthetic oligonucleotide
  source 1..16: mol_type = other DNA
cacccatagacaactt

SEQ ID NO: 74 - DNA, 16 bp, synthetic construct
  misc_feature 1..16: note = Synthetic oligonucleotide
  source 1..16: mol_type = other DNA
ccacccatagacaact

SEQ ID NO: 75 - DNA, 17 bp, synthetic construct
  misc_feature 1..17: note = Synthetic oligonucleotide
  source 1..17: mol_type = other DNA
acccacccatagacaac

SEQ ID NO: 76 - DNA, 15 bp, synthetic construct
  misc_feature 1..15: note = Synthetic oligonucleotide
  source 1..15: mol_type = other DNA
agctacccaccgaca

SEQ ID NO: 77 - DNA, 19 bp, synthetic construct
  misc_feature 1..19: note = Synthetic oligonucleotide
  source 1..19: mol_type = other DNA
catacttcttcacttcaaa

SEQ ID NO: 78 - DNA, 21 bp, synthetic construct
  misc_feature 1..21: note = Synthetic oligonucleotide
  source 1..21: mol_type = other DNA
accatacttcttcacttcaaa

SEQ ID NO: 79 - DNA, 18 bp, synthetic construct
  misc_feature 1..18: note = Synthetic oligonucleotide
  source 1..18: mol_type = other DNA
atacttcttcacttcaaa

SEQ ID NO: 80 - DNA, 21 bp, synthetic construct
  misc_feature 1..21: note = Synthetic oligonucleotide
  source 1..21: mol_type = other DNA
caccatacttcttcacttcaa

SEQ ID NO: 81 - DNA, 18 bp, synthetic construct
  misc_feature 1..18: note = Synthetic oligonucleotide
  source 1..18: mol_type = other DNA
catacttcttcacttcaa

SEQ ID NO: 82 - DNA, 20 bp, synthetic construct
  misc_feature 1..20: note = Synthetic oligonucleotide
  source 1..20: mol_type = other DNA
accatacttcttcacttcaa

SEQ ID NO: 83 - DNA, 19 bp, synthetic construct
  misc_feature 1..19: note = Synthetic oligonucleotide
  source 1..19: mol_type = other DNA
ccatacttcttcacttcaa

SEQ ID NO: 84 - DNA, 19 bp, synthetic construct
  misc_feature 1..19: note = Synthetic oligonucleotide
  source 1..19: mol_type = other DNA
accatacttcttcacttca

SEQ ID NO: 85 - DNA, 17 bp, synthetic construct
  misc_feature 1..17: note = Synthetic oligonucleotide
  source 1..17: mol_type = other DNA
catacttcttcacttca

SEQ ID NO: 86 - DNA, 18 bp, synthetic construct
  misc_feature 1..18: note = Synthetic oligonucleotide
  source 1..18: mol_type = other DNA
ccatacttcttcacttca

SEQ ID NO: 87 - DNA, 18 bp, synthetic construct
  misc_feature 1..18: note = Synthetic oligonucleotide
  source 1..18: mol_type = other DNA
accatacttcttcacttc

SEQ ID NO: 88 - DNA, 19 bp, synthetic construct
  misc_feature 1..19: note = Synthetic oligonucleotide
  source 1..19: mol_type = other DNA
caccatacttcttcacttc

SEQ ID NO: 89 - DNA, 17 bp, synthetic construct
  misc_feature 1..17: note = Synthetic oligonucleotide
  source 1..17: mol_type = other DNA
accatacttcttcactt

SEQ ID NO: 90 - DNA, 19 bp, synthetic construct
  misc_feature 1..19: note = Synthetic oligonucleotide
  source 1..19: mol_type = other DNA
tcaccatacttcttcactt

SEQ ID NO: 91 - DNA, 18 bp, synthetic construct
  misc_feature 1..18: note = Synthetic oligonucleotide
  source 1..18: mol_type = other DNA
caccatacttcttcactt

SEQ ID NO: 92 - DNA, 17 bp, synthetic construct
  misc_feature 1..17: note = Synthetic oligonucleotide
  source 1..17: mol_type = other DNA
caccatacttcttcact

SEQ ID NO: 93 - DNA, 18 bp, synthetic construct
  misc_feature 1..18: note = Synthetic oligonucleotide
  source 1..18: mol_type = other DNA
tcaccatacttcttcact

SEQ ID NO: 94 - DNA, 20 bp, synthetic construct
  misc_feature 1..20: note = Synthetic oligonucleotide
  source 1..20: mol_type = other DNA
cactcaccatacttcttcac

SEQ ID NO: 95 - DNA, 17 bp, synthetic construct
  misc_feature 1..17: note = Synthetic oligonucleotide
  source 1..17: mol_type = other DNA
tcaccatacttcttcac

SEQ ID NO: 96 - DNA, 18 bp, synthetic construct
  misc_feature 1..18: note = Synthetic oligonucleotide
  source 1..18: mol_type = other DNA
actcaccatacttcttca

SEQ ID NO: 97 - DNA, 19 bp, synthetic construct
  misc_feature 1..19: note = Synthetic oligonucleotide
  source 1..19: mol_type = other DNA
cactcaccatacttcttca

SEQ ID NO: 98 - DNA, 17 bp, synthetic construct
  misc_feature 1..17: note = Synthetic oligonucleotide
  source 1..17: mol_type = other DNA
ctcaccatacttcttca

SEQ ID NO: 99 - DNA, 18 bp, synthetic construct
  misc_feature 1..18: note = Synthetic oligonucleotide
  source 1..18: mol_type = other DNA
cactcaccatacttcttc

SEQ ID NO: 100 - DNA, 17 bp, synthetic construct
  misc_feature 1..17: note = Synthetic oligonucleotide
  source 1..17: mol_type = other DNA
cactcaccatacttctt

SEQ ID NO: 101 - DNA, 17 bp, synthetic construct
  misc_feature 1..17: note = Synthetic oligonucleotide
  source 1..17: mol_type = other DNA
gcactcaccatacttct

SEQ ID NO: 102 - DNA, 19 bp, synthetic construct
  misc_feature 1..19: note = Synthetic oligonucleotide
  source 1..19: mol_type = other DNA
tcagcactcaccatacttc

SEQ ID NO: 103 - DNA, 16 bp, synthetic construct
  misc_feature 1..16: note = Synthetic oligonucleotide
  source 1..16: mol_type = other DNA
gcactcaccatacttc

SEQ ID NO: 104 - DNA, 17 bp, synthetic construct
  misc_feature 1..17: note = Synthetic oligonucleotide
  source 1..17: mol_type = other DNA
agcactcaccatacttc

SEQ ID NO: 105 - DNA, 18 bp, synthetic construct
  misc_feature 1..18: note = Synthetic oligonucleotide
  source 1..18: mol_type = other DNA
tcagcactcaccatactt

SEQ ID NO: 106 - DNA, 17 bp, synthetic construct
  misc_feature 1..17: note = Synthetic oligonucleotide
  source 1..17: mol_type = other DNA
cagcactcaccatactt

SEQ ID NO: 107 - DNA, 16 bp, synthetic construct
  misc_feature 1..16: note = Synthetic oligonucleotide
  source 1..16: mol_type = other DNA
agcactcaccatactt

SEQ ID NO: 108 - DNA, 17 bp, synthetic construct
  misc_feature 1..17: note = Synthetic oligonucleotide
  source 1..17: mol_type = other DNA
acttcagcactcaccat

SEQ ID NO: 109 - DNA, 16 bp, synthetic construct
  misc_feature 1..16: note = Synthetic oligonucleotide
  source 1..16: mol_type = other DNA
gagtaatcttcacctc

SEQ ID NO: 110 - DNA, 17 bp, synthetic construct
  misc_feature 1..17: note = Synthetic oligonucleotide
  source 1..17: mol_type = other DNA
taattggatttcatcac

SEQ ID NO: 111 - DNA, 16 bp, synthetic construct
  misc_feature 1..16: note = Synthetic oligonucleotide
  source 1..16: mol_type = other DNA
gacgctaccctacctt

SEQ ID NO: 112 - DNA, 16 bp, synthetic construct
  misc_feature 1..16: note = Synthetic oligonucleotide
  source 1..16: mol_type = other DNA
tgacgctaccctacct

SEQ ID NO: 113 - DNA, 15 bp, synthetic construct
  misc_feature 1..15: note = Synthetic oligonucleotide
  source 1..15: mol_type = other DNA
gacgctaccctacct

SEQ ID NO: 114 - DNA, 16 bp, synthetic construct
  misc_feature 1..16: note = Synthetic oligonucleotide
  source 1..16: mol_type = other DNA
ttgacgctaccctacc

SEQ ID NO: 115 - DNA, 15 bp, synthetic construct
  misc_feature 1..15: note = Synthetic oligonucleotide
  source 1..15: mol_type = other DNA
ttgacgctaccctac

SEQ ID NO: 116 - DNA, 16 bp, synthetic construct
  misc_feature 1..16: note = Synthetic oligonucleotide
  source 1..16: mol_type = other DNA
cttgacgctaccctac

SEQ ID NO: 117 - DNA, 15 bp, synthetic construct
  misc_feature 1..15: note = Synthetic oligonucleotide
  source 1..15: mol_type = other DNA
cttgacgctacccta

SEQ ID NO: 118 - DNA, 16 bp, synthetic construct
  misc_feature 1..16: note = Synthetic oligonucleotide
  source 1..16: mol_type = other DNA
ccttccaccaactaag

SEQ ID NO: 119 - DNA, 17 bp, synthetic construct
  misc_feature 1..17: note = Synthetic oligonucleotide
  source 1..17: mol_type = other DNA
aatattgattttatcca

SEQ ID NO: 120 - DNA, 17 bp, synthetic construct
  misc_feature 1..17: note = Synthetic oligonucleotide
  source 1..17: mol_type = other DNA
caatattgattttatcc

SEQ ID NO: 121 - DNA, 18 bp, synthetic construct
  misc_feature 1..18: note = Synthetic oligonucleotide
  source 1..18: mol_type = other DNA
ccaatattgattttatcc

SEQ ID NO: 122 - DNA, 17 bp, synthetic construct
  misc_feature 1..17: note = Synthetic oligonucleotide
  source 1..17: mol_type = other DNA
tctctgaccccaatatt

SEQ ID NO: 123 - DNA, 18 bp, synthetic construct
  misc_feature 1..18: note = Synthetic oligonucleotide
  source 1..18: mol_type = other DNA
catttgcatttttaaact

SEQ ID NO: 124 - DNA, 18 bp, synthetic construct
  misc_feature 1..18: note = Synthetic oligonucleotide
  source 1..18: mol_type = other DNA
ccatttgcatttttaaac

SEQ ID NO: 125 - DNA, 16 bp, synthetic construct
  misc_feature 1..16: note = Synthetic oligonucleotide
  source 1..16: mol_type = other DNA
aacaactcatgcaccc

SEQ ID NO: 126 - DNA, 17 bp, synthetic construct
  misc_feature 1..17: note = Synthetic oligonucleotide
  source 1..17: mol_type = other DNA
cccaggaaacaactcat

SEQ ID NO: 127 - DNA, 17 bp, synthetic construct
  misc_feature 1..17: note = Synthetic oligonucleotide
  source 1..17: mol_type = other DNA
cacccaggaaacaactc

SEQ ID NO: 128 - DNA, 17 bp, synthetic construct
  misc_feature 1..17: note = Synthetic oligonucleotide
  source 1..17: mol_type = other DNA
caagtcccacataccat

SEQ ID NO: 129 - DNA, 17 bp, synthetic construct
  misc_feature 1..17: note = Synthetic oligonucleotide
  source 1..17: mol_type = other DNA
tataccccaagtcccac

SEQ ID NO: 130 - DNA, 16 bp, synthetic construct
  misc_feature 1..16: note = Synthetic oligonucleotide
  source 1..16: mol_type = other DNA
actcctataccccaag

SEQ ID NO: 131 - DNA, 16 bp, synthetic construct
  misc_feature 1..16: note = Synthetic oligonucleotide
  source 1..16: mol_type = other DNA
ctaaaccagtcatcct

SEQ ID NO: 132 - DNA, 16 bp, synthetic construct
  misc_feature 1..16: note = Synthetic oligonucleotide
  source 1..16: mol_type = other DNA
gctaaaccagtcatcc

SEQ ID NO: 133 - DNA, 17 bp, synthetic construct
  misc_feature 1..17: note = Synthetic oligonucleotide
  source 1..17: mol_type = other DNA
ctgttgattacttcaaa

SEQ ID NO: 134 - DNA, 16 bp, synthetic construct
  misc_feature 1..16: note = Synthetic oligonucleotide
  source 1..16: mol_type = other DNA
tagtcgatcaccatca

SEQ ID NO: 135 - DNA, 16 bp, synthetic construct
  misc_feature 1..16: note = Synthetic oligonucleotide
  source 1..16: mol_type = other DNA
ttagtcgatcaccatc

SEQ ID NO: 136 - DNA, 15 bp, synthetic construct
  misc_feature 1..15: note = Synthetic oligonucleotide
  source 1..15: mol_type = other DNA
tagtcgatcaccatc

SEQ ID NO: 137 - DNA, 15 bp, synthetic construct
  misc_feature 1..15: note = Synthetic oligonucleotide
  source 1..15: mol_type = other DNA
ttagtcgatcaccat

SEQ ID NO: 138 - DNA, 17 bp, synthetic construct
  misc_feature 1..17: note = Synthetic oligonucleotide
  source 1..17: mol_type = other DNA
ctacgttcttaccctct

SEQ ID NO: 139 - DNA, 16 bp, synthetic construct
  misc_feature 1..16: note = Synthetic oligonucleotide
  source 1..16: mol_type = other DNA
tacgttcttaccctct

SEQ ID NO: 140 - DNA, 18 bp, synthetic construct
  misc_feature 1..18: note = Synthetic oligonucleotide
  source 1..18: mol_type = other DNA
cactacgttcttaccctc

SEQ ID NO: 141 - DNA, 16 bp, synthetic construct
  misc_feature 1..16: note = Synthetic oligonucleotide
  source 1..16: mol_type = other DNA
ctacgttcttaccctc

SEQ ID NO: 142 - DNA, 17 bp, synthetic construct
  misc_feature 1..17: note = Synthetic oligonucleotide
  source 1..17: mol_type = other DNA
actacgttcttaccctc

SEQ ID NO: 143 - DNA, 17 bp, synthetic construct
  misc_feature 1..17: note = Synthetic oligonucleotide
  source 1..17: mol_type = other DNA
cactacgttcttaccct

SEQ ID NO: 144 - DNA, 16 bp, synthetic construct
  misc_feature 1..16: note = Synthetic oligonucleotide
  source 1..16: mol_type = other DNA
actacgttcttaccct

SEQ ID NO: 145 - DNA, 15 bp, synthetic construct
  misc_feature 1..15: note = Synthetic oligonucleotide
  source 1..15: mol_type = other DNA
actacgttcttaccc

SEQ ID NO: 146 - DNA, 17 bp, synthetic construct
  misc_feature 1..17: note = Synthetic oligonucleotide
  source 1..17: mol_type = other DNA
tcactacgttcttaccc

SEQ ID NO: 147 - DNA, 16 bp, synthetic construct
  misc_feature 1..16: note = Synthetic oligonucleotide
  source 1..16: mol_type = other DNA
cactacgttcttaccc

SEQ ID NO: 148 - DNA, 16 bp, synthetic construct
  misc_feature 1..16: note = Synthetic oligonucleotide
  source 1..16: mol_type = other DNA
tcactacgttcttacc

SEQ ID NO: 149 - DNA, 15 bp, synthetic construct
  misc_feature 1..15: note = Synthetic oligonucleotide
  source 1..15: mol_type = other DNA
cactacgttcttacc

SEQ ID NO: 150 - DNA, 17 bp, synthetic construct
  misc_feature 1..17: note = Synthetic oligonucleotide
  source 1..17: mol_type = other DNA
ctcactacgttcttacc

SEQ ID NO: 151 - DNA, 18 bp, synthetic construct
  misc_feature 1..18: note = Synthetic oligonucleotide
  source 1..18: mol_type = other DNA
cactcactacgttcttac

SEQ ID NO: 152 - DNA, 17 bp, synthetic construct
  misc_feature 1..17: note = Synthetic oligonucleotide
  source 1..17: mol_type = other DNA
actcactacgttcttac

SEQ ID NO: 153 - DNA, 15 bp, synthetic construct
  misc_feature 1..15: note = Synthetic oligonucleotide
  source 1..15: mol_type = other DNA
tcactacgttcttac

SEQ ID NO: 154 - DNA, 16 bp, synthetic construct
  misc_feature 1..16: note = Synthetic oligonucleotide
  source 1..16: mol_type = other DNA
ctcactacgttcttac

SEQ ID NO: 155 - DNA, 18 bp, synthetic construct
  misc_feature 1..18: note = Synthetic oligonucleotide
  source 1..18: mol_type = other DNA
ccactcactacgttctta

SEQ ID NO: 156 - DNA, 15 bp, synthetic construct
  misc_feature 1..15: note = Synthetic oligonucleotide
  source 1..15: mol_type = other DNA
ctcactacgttctta

SEQ ID NO: 157 - DNA, 16 bp, synthetic construct
  misc_feature 1..16: note = Synthetic oligonucleotide
  source 1..16: mol_type = other DNA
actcactacgttctta

SEQ ID NO: 158 - DNA, 16 bp, synthetic construct
  misc_feature 1..16: note = Synthetic oligonucleotide
  source 1..16: mol_type = other DNA
cactcactacgttctt

SEQ ID NO: 159 - DNA, 16 bp, synthetic construct
  misc_feature 1..16: note = Synthetic oligonucleotide
  source 1..16: mol_type = other DNA
ccactcactacgttct

SEQ ID NO: 160 - DNA, 16 bp, synthetic construct
  misc_feature 1..16: note = Synthetic oligonucleotide
  source 1..16: mol_type = other DNA
cccactcactacgttc

SEQ ID NO: 161 - DNA, 15 bp, synthetic construct
  misc_feature 1..15: note = Synthetic oligonucleotide
  source 1..15: mol_type = other DNA
ccactcactacgttc

SEQ ID NO: 162 - DNA, 15 bp, synthetic construct
  misc_feature 1..15: note = Synthetic oligonucleotide
  source 1..15: mol_type = other DNA
cccactcactacgtt

SEQ ID NO: 163 - DNA, 18 bp, synthetic construct
  misc_feature 1..18: note = Synthetic oligonucleotide
  source 1..18: mol_type = other DNA
agttaacatttctctttt

SEQ ID NO: 164 - DNA, 18 bp, synthetic construct
  misc_feature 1..18: note = Synthetic oligonucleotide
  source 1..18: mol_type = other DNA
aagttaacatttctcttt

SEQ ID NO: 165 - DNA, 18 bp, synthetic construct
  misc_feature 1..18: note = Synthetic oligonucleotide
  source 1..18: mol_type = other DNA
caacatacacttctcact

SEQ ID NO: 166 - DNA, 20 bp, synthetic construct
  misc_feature 1..20: note = Synthetic oligonucleotide
  source 1..20: mol_type = other DNA
cacaacatacacttctcact

SEQ ID NO: 167 - DNA, 17 bp, synthetic construct
  misc_feature 1..17: note = Synthetic oligonucleotide
  source 1..17: mol_type = other DNA
aacatacacttctcact

SEQ ID NO: 168 - DNA, 19 bp, synthetic construct
  misc_feature 1..19: note = Synthetic oligonucleotide
  source 1..19: mol_type = other DNA
acaacatacacttctcact

SEQ ID NO: 169 - DNA, 20 bp, synthetic construct
  misc_feature 1..20: note = Synthetic oligonucleotide
  source 1..20: mol_type = other DNA
ccacaacatacacttctcac

SEQ ID NO: 170 - DNA, 19 bp, synthetic construct
  misc_feature 1..19: note = Synthetic oligonucleotide
  source 1..19: mol_type = other DNA
cacaacatacacttctcac

SEQ ID NO: 171 - DNA, 18 bp, synthetic construct
  misc_feature 1..18: note = Synthetic oligonucleotide
  source 1..18: mol_type = other DNA
cacaacatacacttctca

SEQ ID NO: 172 - DNA, 19 bp, synthetic construct
  misc_feature 1..19: note = Synthetic oligonucleotide
  source 1..19: mol_type = other DNA
ccacaacatacacttctca

SEQ ID NO: 173 - DNA, 17 bp, synthetic construct
  misc_feature 1..17: note = Synthetic oligonucleotide
  source 1..17: mol_type = other DNA
cacaacatacacttctc

SEQ ID NO: 174 - DNA, 18 bp, synthetic construct
  misc_feature 1..18: note = Synthetic oligonucleotide
  source 1..18: mol_type = other DNA
ccacaacatacacttctc

SEQ ID NO: 175 - DNA, 18 bp, synthetic construct
  misc_feature 1..18: note = Synthetic oligonucleotide
  source 1..18: mol_type = other DNA
cccacaacatacacttct

SEQ ID NO: 176 - DNA, 19 bp, synthetic construct
  misc_feature 1..19: note = Synthetic oligonucleotide
  source 1..19: mol_type = other DNA
acccacaacatacacttct

SEQ ID NO: 177 - DNA, 19 bp, synthetic construct
  misc_feature 1..19: note = Synthetic oligonucleotide
  source 1..19: mol_type = other DNA
cacccacaacatacacttc

SEQ ID NO: 178 - DNA, 18 bp, synthetic construct
  misc_feature 1..18: note = Synthetic oligonucleotide
  source 1..18: mol_type = other DNA
acccacaacatacacttc

SEQ ID NO: 179 - DNA, 17 bp, synthetic construct
  misc_feature 1..17: note = Synthetic oligonucleotide
  source 1..17: mol_type = other DNA
cccacaacatacacttc

SEQ ID NO: 180 - DNA, 18 bp, synthetic construct
  misc_feature 1..18: note = Synthetic oligonucleotide
  source 1..18: mol_type = other DNA
cacccacaacatacactt

SEQ ID NO: 181 - DNA, 17 bp, synthetic construct
  misc_feature 1..17: note = Synthetic oligonucleotide
  source 1..17: mol_type = other DNA
acccacaacatacactt

SEQ ID NO: 182 - DNA, 17 bp, synthetic construct
  misc_feature 1..17: note = Synthetic oligonucleotide
  source 1..17: mol_type = other DNA
cacccacaacatacact

SEQ ID NO: 183 - DNA, 17 bp, synthetic construct
  misc_feature 1..17: note = Synthetic oligonucleotide
  source 1..17: mol_type = other DNA
ggcacccacaacataca

SEQ ID NO: 184 - DNA, 16 bp, synthetic construct
  misc_feature 1..16: note = Synthetic oligonucleotide
  source 1..16: mol_type = other DNA
ctccataccacaactg

SEQ ID NO: 185 - DNA, 16 bp, synthetic construct
  misc_feature 1..16: note = Synthetic oligonucleotide
  source 1..16: mol_type = other DNA
cctccataccacaact

SEQ ID NO: 186 - DNA, 17 bp, synthetic construct
  misc_feature 1..17: note = Synthetic oligonucleotide
  source 1..17: mol_type = other DNA
accctccataccacaac

SEQ ID NO: 187 - DNA, 16 bp, synthetic construct
  misc_feature 1..16: note = Synthetic oligonucleotide
  source 1..16: mol_type = other DNA
ccctccataccacaac

SEQ ID NO: 188 - DNA, 17 bp, synthetic construct
  misc_feature 1..17: note = Synthetic oligonucleotide
  source 1..17: mol_type = other DNA
caccctccataccacaa

SEQ ID NO: 189 - DNA, 17 bp, synthetic construct
  misc_feature 1..17: note = Synthetic oligonucleotide
  source 1..17: mol_type = other DNA
caaacctagaaccacca

SEQ ID NO: 190 - DNA, 16 bp, synthetic construct
  misc_feature 1..16: note = Synthetic oligonucleotide
  source 1..16: mol_type = other DNA
caaacctagaaccacc

SEQ ID NO: 191 - DNA, 17 bp, synthetic construct
  misc_feature 1..17: note = Synthetic oligonucleotide
  source 1..17: mol_type = other DNA
tcaaacctagaaccacc

SEQ ID NO: 192 - DNA, 17 bp, synthetic construct
  misc_feature 1..17: note = Synthetic oligonucleotide
  source 1..17: mol_type = other DNA
atcaaacctagaaccac

SEQ ID NO: 193 - DNA, 18 bp, synthetic construct
  misc_feature 1..18: note = Synthetic oligonucleotide
  source 1..18: mol_type = other DNA
catcaaacctagaaccac

SEQ ID NO: 194 - DNA, 16 bp, synthetic construct
  misc_feature 1..16: note = Synthetic oligonucleotide
  source 1..16: mol_type = other DNA
tcaaacctagaaccac

SEQ ID NO: 195 - DNA, 16 bp, synthetic construct
  misc_feature 1..16: note = Synthetic oligonucleotide
  source 1..16: mol_type = other DNA
catcaaacctagaacc

SEQ ID NO: 196 - DNA, 16 bp, synthetic construct
  misc_feature 1..16: note = Synthetic oligonucleotide
  source 1..16: mol_type = other DNA
ccatcaaacctagaac

SEQ ID NO: 197 - DNA, 17 bp, synthetic construct
  misc_feature 1..17: note = Synthetic oligonucleotide
  source 1..17: mol_type = other DNA
agcatccatcaaaccta

SEQ ID NO: 198 - DNA, 16 bp, synthetic construct
  misc_feature 1..16: note = Synthetic oligonucleotide
  source 1..16: mol_type = other DNA
gcatccatcaaaccta

SEQ ID NO: 199 - DNA, 17 bp, synthetic construct
  misc_feature 1..17: note = Synthetic oligonucleotide
  source 1..17: mol_type = other DNA
cagcatccatcaaacct

SEQ ID NO: 200 - DNA, 17 bp, synthetic construct
  misc_feature 1..17: note = Synthetic oligonucleotide
  source 1..17: mol_type = other DNA
tcagcatccatcaaacc

SEQ ID NO: 201 - DNA, 16 bp, synthetic construct
  misc_feature 1..16: note = Synthetic oligonucleotide
  source 1..16: mol_type = other DNA
cagcaaacttgcaaca

SEQ ID NO: 202 - DNA, 16 bp, synthetic construct
  misc_feature 1..16: note = Synthetic oligonucleotide
  source 1..16: mol_type = other DNA
tctacaggttccactc

SEQ ID NO: 203 - DNA, 15 bp, synthetic construct
  misc_feature 1..15: note = Synthetic oligonucleotide
  source 1..15: mol_type = other DNA
aacactcgaacacga

SEQ ID NO: 204 - DNA, 15 bp, synthetic construct
  misc_feature 1..15: note = Synthetic oligonucleotide
  source 1..15: mol_type = other DNA
cccctacggtctcac

SEQ ID NO: 205 - DNA, 16 bp, synthetic construct
  misc_feature 1..16: note = Synthetic oligonucleotide
  source 1..16: mol_type = other DNA
tcccctacggtctcac

SEQ ID NO: 206 - DNA, 17 bp, synthetic construct
  misc_feature 1..17: note = Synthetic oligonucleotide
  source 1..17: mol_type = other DNA
tcacatggacactcacc

SEQ ID NO: 207 - DNA, 16 bp, synthetic construct
  misc_feature 1..16: note = Synthetic oligonucleotide
  source 1..16: mol_type = other DNA
attgtaagtttatcca

SEQ ID NO: 208 - DNA, 16 bp, synthetic construct
  misc_feature 1..16: note = Synthetic oligonucleotide
  source 1..16: mol_type = other DNA
caattgagtcacaata

SEQ ID NO: 209 - DNA, 18 bp, synthetic construct
  misc_feature 1..18: note = Synthetic oligonucleotide
  source 1..18: mol_type = other DNA
ctcaatataagtaaacaa

SEQ ID NO: 210 - DNA, 17 bp, synthetic construct
  misc_feature 1..17: note = Synthetic oligonucleotide
  source 1..17: mol_type = other DNA
gcctctgtctcaatata

SEQ ID NO: 211 - DNA, 17 bp, synthetic construct
  misc_feature 1..17: note = Synthetic oligonucleotide
  source 1..17: mol_type = other DNA
agactagtaattccaaa

SEQ ID NO: 212 - DNA, 17 bp, synthetic construct
  misc_feature 1..17: note = Synthetic oligonucleotide
  source 1..17: mol_type = other DNA
ttctctaccatgtacaa

SEQ ID NO: 213 - DNA, 17 bp, synthetic construct
  misc_feature 1..17: note = Synthetic oligonucleotide
  source 1..17: mol_type = other DNA
cttaacccagaaccttt

SEQ ID NO: 214 - DNA, 17 bp, synthetic construct
  misc_feature 1..17: note = Synthetic oligonucleotide
  source 1..17: mol_type = other DNA
ccttaacccagaacctt

SEQ ID NO: 215 - DNA, 17 bp, synthetic construct
  misc_feature 1..17: note = Synthetic oligonucleotide
  source 1..17: mol_type = other DNA
ttcccttaacccagaac

SEQ ID NO: 216 - DNA, 16 bp, synthetic construct
  misc_feature 1..16: note = Synthetic oligonucleotide
  source 1..16: mol_type = other DNA
caaggttcctactctc

SEQ ID NO: 217 - DNA, 18 bp, synthetic construct
  misc_feature 1..18: note = Synthetic oligonucleotide
  source 1..18: mol_type = other DNA
ccaaactcagaatcttca

SEQ ID NO: 218 - DNA, 16 bp, synthetic construct
  misc_feature 1..16: note = Synthetic oligonucleotide
  source 1..16: mol_type = other DNA
tgctgacatcctacac

SEQ ID NO: 219 - DNA, 17 bp, synthetic construct
  misc_feature 1..17: note = Synthetic oligonucleotide
  source 1..17: mol_type = other DNA
ctgctgacatcctacac

SEQ ID NO: 220 - DNA, 17 bp, synthetic construct
  misc_feature 1..17: note = Synthetic oligonucleotide
  source 1..17: mol_type = other DNA
cacggcttccttaccac

SEQ ID NO: 221 - DNA, 16 bp, synthetic construct
  misc_feature 1..16: note = Synthetic oligonucleotide
  source 1..16: mol_type = other DNA
cacggcttccttacca

SEQ ID NO: 222 - DNA, 17 bp, synthetic construct
  misc_feature 1..17: note = Synthetic oligonucleotide
  source 1..17: mol_type = other DNA
caacacaactttgtcct

SEQ ID NO: 223 - DNA, 16 bp, synthetic construct
  misc_feature 1..16: note = Synthetic oligonucleotide
  source 1..16: mol_type = other DNA
aataccccagcaaccc

SEQ ID NO: 224 - DNA, 16 bp, synthetic construct
  misc_feature 1..16: note = Synthetic oligonucleotide
  source 1..16: mol_type = other DNA
caataccccagcaacc

SEQ ID NO: 225 - DNA, 16 bp, synthetic construct
  misc_feature 1..16: note = Synthetic oligonucleotide
  source 1..16: mol_type = other DNA
ccaataccccagcaac

SEQ ID NO: 226 - DNA, 16 bp, synthetic construct
  misc_feature 1..16: note = Synthetic oligonucleotide
  source 1..16: mol_type = other DNA
cccaataccccagcaa

SEQ ID NO: 227 - DNA, 19 bp, synthetic construct
  misc_feature 1..19: note = Synthetic oligonucleotide
  source 1..19: mol_type = other DNA
aacaatgaaatatattcat

SEQ ID NO: 228 - DNA, 18 bp, synthetic construct
  misc_feature 1..18: note = Synthetic oligonucleotide
  source 1..18: mol_type = other DNA
acaatgaaatatattcat

SEQ ID NO: 229 - DNA, 20 bp, synthetic construct
  misc_feature 1..20: note = Synthetic oligonucleotide
  source 1..20: mol_type = other DNA
gatattacaattcataacta

SEQ ID NO: 230 - DNA, 21 bp, synthetic construct
  misc_feature 1..21: note = Synthetic oligonucleotide
  source 1..21: mol_type = other DNA
cagatattacaattcataact

SEQ ID NO: 231 - DNA, 19 bp, synthetic construct
  misc_feature 1..19: note = Synthetic oligonucleotide
  source 1..19: mol_type = other DNA
gatattacaattcataact

SEQ ID NO: 232 - DNA, 20 bp, synthetic construct
  misc_feature 1..20: note = Synthetic oligonucleotide
  source 1..20: mol_type = other DNA
agatattacaattcataact

SEQ ID NO: 233 - DNA, 18 bp, synthetic construct
  misc_feature 1..18: note = Synthetic oligonucleotide
  source 1..18: mol_type = other DNA
gtcagatattacaattca

SEQ ID NO: 234 - DNA, 17 bp, synthetic construct
  misc_feature 1..17: note = Synthetic oligonucleotide
  source 1..17: mol_type = other DNA
aatctccagaacaacta

SEQ ID NO: 235 - DNA, 17 bp, synthetic construct
  misc_feature 1..17: note = Synthetic oligonucleotide
  source 1..17: mol_type = other DNA
caatctccagaacaact

SEQ ID NO: 236 - DNA, 17 bp, synthetic construct
  misc_feature 1..17: note = Synthetic oligonucleotide
  source 1..17: mol_type = other DNA
tcaatctccagaacaac

SEQ ID NO: 237 - DNA, 17 bp, synthetic construct
  misc_feature 1..17: note = Synthetic oligonucleotide
  source 1..17: mol_type = other DNA
tacagtgtcaatctcca

SEQ ID NO: 238 - DNA, 16 bp, synthetic construct
  misc_feature 1..16: note = Synthetic oligonucleotide
  source 1..16: mol_type = other DNA
ctacagtgtcaatctc

SEQ ID NO: 239 - DNA, 16 bp, synthetic construct
  misc_feature 1..16: note = Synthetic oligonucleotide
  source 1..16: mol_type = other DNA
tagtagccccacacac

SEQ ID NO: 240 - DNA, 16 bp, synthetic construct
  misc_feature 1..16: note = Synthetic oligonucleotide
  source 1..16: mol_type = other DNA
cccctgtacactttac

SEQ ID NO: 241 - DNA, 16 bp, synthetic construct
  misc_feature 1..16: note = Synthetic oligonucleotide
  source 1..16: mol_type = other DNA
ctaccaagacatctat

SEQ ID NO: 242 - DNA, 16 bp, synthetic construct
  misc_feature 1..16: note = Synthetic oligonucleotide
  source 1..16: mol_type = other DNA
gctaccaagacatcta

SEQ ID NO: 243 - DNA, 17 bp, synthetic construct
  misc_feature 1..17: note = Synthetic oligonucleotide
  source 1..17: mol_type = other DNA
tgaccttcacttctatc

SEQ ID NO: 244 - DNA, 19 bp, synthetic construct
  misc_feature 1..19: note = Synthetic oligonucleotide
  source 1..19: mol_type = other DNA
cactcaccagatacacaca

SEQ ID NO: 245 - DNA, 18 bp, synthetic construct
  misc_feature 1..18: note = Synthetic oligonucleotide
  source 1..18: mol_type = other DNA
actcaccagatacacaca

SEQ ID NO: 246 - DNA, 16 bp, synthetic construct
  misc_feature 1..16: note = Synthetic oligonucleotide
  source 1..16: mol_type = other DNA
tctctttactcaccga

SEQ ID NO: 247 - DNA, 20 bp, synthetic construct
  misc_feature 1..20: note = Synthetic oligonucleotide
  source 1..20: mol_type = other DNA
gaaacttctctttactcacc

SEQ ID NO: 248 - DNA, 17 bp, synthetic construct
  misc_feature 1..17: note = Synthetic oligonucleotide
  source 1..17: mol_type = other DNA
acttctctttactcacc

SEQ ID NO: 249 - DNA, 19 bp, synthetic construct
  misc_feature 1..19: note = Synthetic oligonucleotide
  source 1..19: mol_type = other DNA
aaacttctctttactcacc

SEQ ID NO: 250 - DNA, 18 bp, synthetic construct
  misc_feature 1..18: note = Synthetic oligonucleotide
  source 1..18: mol_type = other DNA
aacttctctttactcacc

SEQ ID NO: 251 - DNA, 19 bp, synthetic construct
  misc_feature 1..19: note = Synthetic oligonucleotide
  source 1..19: mol_type = other DNA
gaaacttctctttactcac

SEQ ID NO: 252 - DNA, 17 bp, synthetic construct
  misc_feature 1..17: note = Synthetic oligonucleotide
  source 1..17: mol_type = other DNA
aacttctctttactcac

SEQ ID NO: 253 - DNA, 18 bp, synthetic construct
  misc_feature 1..18: note = Synthetic oligonucleotide
  source 1..18: mol_type = other DNA
aaacttctctttactcac

SEQ ID NO: 254 - DNA, 20 bp, synthetic construct
  misc_feature 1..20: note = Synthetic oligonucleotide
  source 1..20: mol_type = other DNA
tgaaacttctctttactcac

SEQ ID NO: 255 - DNA, 17 bp, synthetic construct
  misc_feature 1..17: note = Synthetic oligonucleotide
  source 1..17: mol_type = other DNA
aaacttctctttactca

SEQ ID NO: 256 - DNA, 18 bp, synthetic construct
  misc_feature 1..18: note = Synthetic oligonucleotide
  source 1..18: mol_type = other DNA
gaaacttctctttactca

SEQ ID NO: 257 - DNA, 19 bp, synthetic construct
  misc_feature 1..19: note = Synthetic oligonucleotide
  source 1..19: mol_type = other DNA
tgaaacttctctttactca

SEQ ID NO: 258 - DNA, 17 bp, synthetic construct
  misc_feature 1..17: note = Synthetic oligonucleotide
  source 1..17: mol_type = other DNA
gaaacttctctttactc

SEQ ID NO: 259 - DNA, 18 bp, synthetic construct
  misc_feature 1..18: note = Synthetic oligonucleotide
  source 1..18: mol_type = other DNA
tgaaacttctctttactc

SEQ ID NO: 260 - DNA, 17 bp, synthetic construct
  misc_feature 1..17: note = Synthetic oligonucleotide
  source 1..17: mol_type = other DNA
tgaaacttctctttact

SEQ ID NO: 261 - DNA, 18 bp, synthetic construct
  misc_feature 1..18: note = Synthetic oligonucleotide
  source 1..18: mol_type = other DNA
gtgaaacttctctttact

SEQ ID NO: 262 - DNA, 18 bp, synthetic construct
  misc_feature 1..18: note = Synthetic oligonucleotide
  source 1..18: mol_type = other DNA
tacagactcaaaaaccca

SEQ ID NO: 263 - DNA, 17 bp, synthetic construct
  misc_feature 1..17: note = Synthetic oligonucleotide
  source 1..17: mol_type = other DNA
acagactcaaaaaccca

SEQ ID NO: 264 - DNA, 19 bp, synthetic construct
  misc_feature 1..19: note = Synthetic oligonucleotide
  source 1..19: mol_type = other DNA
atacagactcaaaaaccca

SEQ ID NO: 265 - DNA, 19 bp, synthetic construct
  misc_feature 1..19: note = Synthetic oligonucleotide
  source 1..19: mol_type = other DNA
catacagactcaaaaaccc

SEQ ID NO: 266 - DNA, 18 bp, synthetic construct
  misc_feature 1..18: note = Synthetic oligonucleotide
  source 1..18: mol_type = other DNA
atacagactcaaaaaccc

SEQ ID NO: 267 - DNA, 17 bp, synthetic construct
  misc_feature 1..17: note = Synthetic oligonucleotide
  source 1..17: mol_type = other DNA
tacagactcaaaaaccc

SEQ ID NO: 268 - DNA, 18 bp, synthetic construct
  misc_feature 1..18: note = Synthetic oligonucleotide
  source 1..18: mol_type = other DNA
catacagactcaaaaacc

SEQ ID NO: 269 - DNA, 17 bp, synthetic construct
  misc_feature 1..17: note = Synthetic oligonucleotide
  source 1..17: mol_type = other DNA
atacagactcaaaaacc

SEQ ID NO: 270 - DNA, 18 bp, synthetic construct
  misc_feature 1..18: note = Synthetic oligonucleotide
  source 1..18: mol_type = other DNA
tcatacagactcaaaaac

SEQ ID NO: 271 - DNA, 19 bp, synthetic construct
  misc_feature 1..19: note = Synthetic oligonucleotide
  source 1..19: mol_type = other DNA
atcatacagactcaaaaac

SEQ ID NO: 272 - DNA, 16 bp, synthetic construct
  misc_feature 1..16: note = Synthetic oligonucleotide
  source 1..16: mol_type = other DNA
acccttatcatacaga

SEQ ID NO: 273 - DNA, 16 bp, synthetic construct
  misc_feature 1..16: note = Synthetic oligonucleotide
  source 1..16: mol_type = other DNA
tgacccttatcataca

SEQ ID NO: 274 - DNA, 17 bp, synthetic construct
  misc_feature 1..17: note = Synthetic oligonucleotide
  source 1..17: mol_type = other DNA
actagactctaaaatct

SEQ ID NO: 275 - DNA, 19 bp, synthetic construct
  misc_feature 1..19: note = Synthetic oligonucleotide
  source 1..19: mol_type = other DNA
ccactagactctaaaatct

SEQ ID NO: 276 - DNA, 18 bp, synthetic construct
  misc_feature 1..18: note = Synthetic oligonucleotide
  source 1..18: mol_type = other DNA
cactagactctaaaatct

SEQ ID NO: 277 - DNA, 17 bp, synthetic construct
  misc_feature 1..17: note = Synthetic oligonucleotide
  source 1..17: mol_type = other DNA
cactagactctaaaatc

SEQ ID NO: 278 - DNA, 18 bp, synthetic construct
  misc_feature 1..18: note = Synthetic oligonucleotide
  source 1..18: mol_type = other DNA
ccactagactctaaaatc

SEQ ID NO: 279 - DNA, 17 bp, synthetic construct
  misc_feature 1..17: note = Synthetic oligonucleotide
  source 1..17: mol_type = other DNA
ccactagactctaaaat

SEQ ID NO: 280 - DNA, 17 bp, synthetic construct
  misc_feature 1..17: note = Synthetic oligonucleotide
  source 1..17: mol_type = other DNA
cactggcatacatctcc

SEQ ID NO: 281 - DNA, 16 bp, synthetic construct
  misc_feature 1..16: note = Synthetic oligonucleotide
  source 1..16: mol_type = other DNA
actggcatacatctcc

SEQ ID NO: 282 - DNA, 15 bp, synthetic construct
  misc_feature 1..15: note = Synthetic oligonucleotide
  source 1..15: mol_type = other DNA
aggcgaacctcatcc

SEQ ID NO: 283 - DNA, 17 bp, synthetic construct
  misc_feature 1..17: note = Synthetic oligonucleotide
  source 1..17: mol_type = other DNA
actgaccatactccact

SEQ ID NO: 284 - DNA, 17 bp, synthetic construct
  misc_feature 1..17: note = Synthetic oligonucleotide
  source 1..17: mol_type = other DNA
gactgaccatactccac

SEQ ID NO: 285 - DNA, 16 bp, synthetic construct
  misc_feature 1..16: note = Synthetic oligonucleotide
  source 1..16: mol_type = other DNA
gactgaccatactcca

SEQ ID NO: 286 - DNA, 15 bp, synthetic construct
  misc_feature 1..15: note = Synthetic oligonucleotide
  source 1..15: mol_type = other DNA
aaccttaaccgtgaa

SEQ ID NO: 287 - DNA, 15 bp, synthetic construct
  misc_feature 1..15: note = Synthetic oligonucleotide
  source 1..15: mol_type = other DNA
cgaagaaccttaacc

SEQ ID NO: 288 - DNA, 16 bp, synthetic construct
  misc_feature 1..16: note = Synthetic oligonucleotide
  source 1..16: mol_type = other DNA
tcgaagaaccttaacc

SEQ ID NO: 289 - DNA, 15 bp, synthetic construct
  misc_feature 1..15: note = Synthetic oligonucleotide
  source 1..15: mol_type = other DNA
tcgaagaaccttaac

SEQ ID NO: 290 - DNA, 16 bp, synthetic construct
  misc_feature 1..16: note = Synthetic oligonucleotide
  source 1..16: mol_type = other DNA
ttctcgaagaacctta

SEQ ID NO: 291 - DNA, 17 bp, synthetic construct
  misc_feature 1..17: note = Synthetic oligonucleotide
  source 1..17: mol_type = other DNA
agatttcccatttccaa

SEQ ID NO: 292 - DNA, 18 bp, synthetic construct
  misc_feature 1..18: note = Synthetic oligonucleotide
  source 1..18: mol_type = other DNA
gagatttcccatttccaa

SEQ ID NO: 293 - DNA, 17 bp, synthetic construct
  misc_feature 1..17: note = Synthetic oligonucleotide
  source 1..17: mol_type = other DNA
gagatttcccatttcca

SEQ ID NO: 294 - DNA, 16 bp, synthetic construct
  misc_feature 1..16: note = Synthetic oligonucleotide
  source 1..16: mol_type = other DNA
acttgttgctcactat

SEQ ID NO: 295 - DNA, 16 bp, synthetic construct
  misc_feature 1..16: note = Synthetic oligonucleotide
  source 1..16: mol_type = other DNA
ccatccccatgatcaa

SEQ ID NO: 296 - DNA, 19 bp, synthetic construct
  misc_feature 1..19: note = Synthetic oligonucleotide
  source 1..19: mol_type = other DNA
cttttcttttatttaccct

SEQ ID NO: 297 - DNA, 18 bp, synthetic construct
  misc_feature 1..18: note = Synthetic oligonucleotide
  source 1..18: mol_type = other DNA
ttttcttttatttaccct

SEQ ID NO: 298 - DNA, 19 bp, synthetic construct
  misc_feature 1..19: note = Synthetic oligonucleotide
  source 1..19: mol_type = other DNA
gcttttcttttatttaccc

SEQ ID NO: 299 - DNA, 18 bp, synthetic construct
  misc_feature 1..18: note = Synthetic oligonucleotide
  source 1..18: mol_type = other DNA
cttttcttttatttaccc

SEQ ID NO: 300 - DNA, 20 bp, synthetic construct
  misc_feature 1..20: note = Synthetic oligonucleotide
  source 1..20: mol_type = other DNA
aagcttttcttttatttacc

SEQ ID NO: 301 - DNA, 18 bp, synthetic construct
  misc_feature 1..18: note = Synthetic oligonucleotide
  source 1..18: mol_type = other DNA
gcttttcttttatttacc

SEQ ID NO: 302 - DNA, 19 bp, synthetic construct
  misc_feature 1..19: note = Synthetic oligonucleotide
  source 1..19: mol_type = other DNA
agcttttcttttatttacc

SEQ ID NO: 303 - DNA, 17 bp, synthetic construct
  source 1..17: mol_type = other DNA
  modified_base 1: mod_base = OTHER; note = 5-methyl beta-D-oxy locked nucleotide with phosphorothioate linkage
  modified_base 2: mod_base = OTHER; note = 5-methyl beta-D-oxy locked nucleotide with phosphorothioate linkage
  modified_base 3: mod_base = OTHER; note = beta-D-oxy locked nucleotide with phosphorothioate linkage
  modified_base 4: mod_base = OTHER; note = beta-D-oxy locked nucleotide with phosphorothioate linkage
  modified_base 5: mod_base = OTHER; note = Nucleotide with phosphorothioate linkage
  modified_base 6: mod_base = OTHER; note = Nucleotide with phosphorothioate linkage
  modified_base 7: mod_base = OTHER; note = Nucleotide with phosphorothioate linkage
  modified_base 8: mod_base = OTHER; note = Nucleotide with phosphorothioate linkage
  modified_base 9: mod_base = OTHER; note = Nucleotide with phosphorothioate linkage
  modified_base 10: mod_base = OTHER; note = Nucleotide with phosphorothioate linkage
  modified_base 11: mod_base = OTHER; note = Nucleotide with phosphorothioate linkage
  modified_base 12: mod_base = OTHER; note = Nucleotide with phosphorothioate linkage
  modified_base 13: mod_base = OTHER; note = Nucleotide with phosphorothioate linkage
  modified_base 14: mod_base = OTHER; note = Nucleotide with phosphorothioate linkage
  modified_base 15: mod_base = OTHER; note = beta-D-oxy locked nucleotide with phosphorothioate linkage
  modified_base 16: mod_base = OTHER; note = beta-D-oxy locked nucleotide with phosphorothioate linkage
  modified_base 17: mod_base = OTHER; note = beta-D-oxy locked nucleotide with phosphorothioate linkage
ccaaattaaccacagaa

SEQ ID NO: 304 - DNA, 18 bp, synthetic construct
  source 1..18: mol_type = other DNA
  modified_base 1: mod_base = OTHER; note = beta-D-oxy locked nucleotide with phosphorothioate linkage
  modified_base 2: mod_base = OTHER; note = beta-D-oxy locked nucleotide with phosphorothioate linkage
  modified_base 3: mod_base = OTHER; note = Nucleotide with phosphorothioate linkage
  modified_base 4: mod_base = OTHER; note = Nucleotide with phosphorothioate linkage
  modified_base 5: mod_base = OTHER; note = Nucleotide with phosphorothioate linkage
  modified_base 6: mod_base = OTHER; note = Nucleotide with phosphorothioate linkage
  modified_base 7: mod_base = OTHER; note = Nucleotide with phosphorothioate linkage
  modified_base 8: mod_base = OTHER; note = Nucleotide with phosphorothioate linkage
  modified_base 9: mod_base = OTHER; note = Nucleotide with phosphorothioate linkage
  modified_base 10: mod_base = OTHER; note = Nucleotide with phosphorothioate linkage
  modified_base 11: mod_base = OTHER; note = Nucleotide with phosphorothioate linkage
  modified_base 12: mod_base = OTHER; note = Nucleotide with phosphorothioate linkage
  modified_base 13: mod_base = OTHER; note = Nucleotide with phosphorothioate linkage
  modified_base 14: mod_base = OTHER; note = Nucleotide with phosphorothioate linkage
  modified_base 15: mod_base = OTHER; note = Nucleotide with phosphorothioate linkage
  modified_base 16: mod_base = OTHER; note = Nucleotide with phosphorothioate linkage
  modified_base 17: mod_base = OTHER; note = 5-methyl beta-D-oxy locked nucleotide with phosphorothioate linkage
  modified_base 18: mod_base = OTHER; note = beta-D-oxy locked nucleotide with phosphorothioate linkage
gtccccaaattaaccaca

SEQ ID NO: 305 - DNA, 17 bp, synthetic construct
  source 1..17: mol_type = other DNA
  modified_base 1: mod_base = OTHER; note = beta-D-oxy locked nucleotide with phosphorothioate linkage
  modified_base 2: mod_base = OTHER; note = beta-D-oxy locked nucleotide with phosphorothioate linkage
  modified_base 3: mod_base = OTHER; note = Nucleotide with phosphorothioate linkage
  modified_base 4: mod_base = OTHER; note = Nucleotide with phosphorothioate linkage
  modified_base 5: mod_base = OTHER; note = Nucleotide with phosphorothioate linkage
  modified_base 6: mod_base = OTHER; note = Nucleotide with phosphorothioate linkage
  modified_base 7: mod_base = OTHER; note = Nucleotide with phosphorothioate linkage
  modified_base 8: mod_base = OTHER; note = Nucleotide with phosphorothioate linkage
  modified_base 9: mod_base = OTHER; note = Nucleotide with phosphorothioate linkage
  modified_base 10: mod_base = OTHER; note = Nucleotide with phosphorothioate linkage
  modified_base 11: mod_base = OTHER; note = Nucleotide with phosphorothioate linkage
  modified_base 12: mod_base = OTHER; note = Nucleotide with phosphorothioate linkage
  modified_base 13: mod_base = OTHER; note = Nucleotide with phosphorothioate linkage
  modified_base 14: mod_base = OTHER; note = Nucleotide with phosphorothioate linkage
  modified_base 15: mod_base = OTHER; note = 5-methyl beta-D-oxy locked nucleotide with phosphorothioate linkage
  modified_base 16: mod_base = OTHER; note = beta-D-oxy locked nucleotide with phosphorothioate linkage
  modified_base 17: mod_base = OTHER; note = 5-methyl beta-D-oxy locked nucleotide with phosphorothioate linkage
gtccccaaattaaccac

SEQ ID NO: 306 - DNA, 17 bp, synthetic construct
  source 1..17: mol_type = other DNA
  modified_base 1: mod_base = OTHER; note = beta-D-oxy locked nucleotide with phosphorothioate linkage
  modified_base 2: mod_base = OTHER; note = beta-D-oxy locked nucleotide with phosphorothioate linkage
  modified_base 3: mod_base = OTHER; note = Nucleotide with phosphorothioate linkage
  modified_base 4: mod_base = OTHER; note = Nucleotide with phosphorothioate linkage
  modified_base 5: mod_base = OTHER; note = Nucleotide with phosphorothioate linkage
  modified_base 6: mod_base = OTHER; note = Nucleotide with phosphorothioate linkage
  modified_base 7: mod_base = OTHER; note = Nucleotide with phosphorothioate linkage
  modified_base 8: mod_base = OTHER; note = Nucleotide with phosphorothioate linkage
  modified_base 9: mod_base = OTHER; note = Nucleotide with phosphorothioate linkage
  modified_base 10: mod_base = OTHER; note = Nucleotide with phosphorothioate linkage
  modified_base 11: mod_base = OTHER; note = Nucleotide with phosphorothioate linkage
  modified_base 12: mod_base = OTHER; note = Nucleotide with phosphorothioate linkage
  modified_base 13: mod_base = OTHER; note = Nucleotide with phosphorothioate linkage
  modified_base 14: mod_base = OTHER; note = Nucleotide with phosphorothioate linkage
  modified_base 15: mod_base = OTHER; note = Nucleotide with phosphorothioate linkage
  modified_base 16: mod_base = OTHER; note = 5-methyl beta-D-oxy locked nucleotide with phosphorothioate linkage
  modified_base 17: mod_base = OTHER; note = beta-D-oxy locked nucleotide with phosphorothioate linkage
tgatccttttacctcct

SEQ ID NO: 307 - DNA, 17 bp, synthetic construct
  source 1..17: mol_type = other DNA
  modified_base 1: mod_base = OTHER; note = beta-D-oxy locked nucleotide with phosphorothioate linkage
  modified_base 2: mod_base = OTHER; note = 5-methyl beta-D-oxy locked nucleotide with phosphorothioate linkage
  modified_base 3: mod_base = OTHER; note = Nucleotide with phosphorothioate linkage
  modified_base 4: mod_base = OTHER; note = Nucleotide with phosphorothioate linkage
  modified_base 5: mod_base = OTHER; note = Nucleotide with phosphorothioate linkage
  modified_base 6: mod_base = OTHER; note = Nucleotide with phosphorothioate linkage
  modified_base 7: mod_base = OTHER; note = Nucleotide with phosphorothioate linkage
  modified_base 8: mod_base = OTHER; note = Nucleotide with phosphorothioate linkage
  modified_base 9: mod_base = OTHER; note = Nucleotide with phosphorothioate linkage
  modified_base 10: mod_base = OTHER; note = Nucleotide with phosphorothioate linkage
  modified_base 11: mod_base = OTHER; note = Nucleotide with phosphorothioate linkage
  modified_base 12: mod_base = OTHER; note = Nucleotide with phosphorothioate linkage
  modified_base 13: mod_base = OTHER; note = Nucleotide with phosphorothioate linkage
  modified_base 14: mod_base = OTHER; note = Nucleotide with phosphorothioate linkage
  modified_base 15: mod_base = OTHER; note = 5-methyl beta-D-oxy locked nucleotide with phosphorothioate linkage
  modified_base 16: mod_base = OTHER; note = beta-D-oxy locked nucleotide with phosphorothioate linkage
  modified_base 17: mod_base = OTHER; note = 5-methyl beta-D-oxy locked nucleotide with phosphorothioate linkage
actgatccttttacctc

SEQ ID NO: 308 - DNA, 18 bp, synthetic construct
  source 1..18: mol_type = other DNA
  modified_base 1: mod_base = OTHER; note = 5-methyl beta-D-oxy locked nucleotide with phosphorothioate linkage
  modified_base 2: mod_base = OTHER; note = beta-D-oxy locked nucleotide with phosphorothioate linkage
  modified_base 3: mod_base = OTHER; note = Nucleotide with phosphorothioate linkage
  modified_base 4: mod_base = OTHER; note = Nucleotide with phosphorothioate linkage
  modified_base 5: mod_base = OTHER; note = Nucleotide with phosphorothioate linkage
  modified_base 6: mod_base = OTHER; note = Nucleotide with phosphorothioate linkage
  modified_base 7: mod_base = OTHER; note = Nucleotide with phosphorothioate linkage
  modified_base 8: mod_base = OTHER; note = Nucleotide with phosphorothioate linkage
  modified_base 9: mod_base = OTHER; note = Nucleotide with phosphorothioate linkage
  modified_base 10: mod_base = OTHER; note = Nucleotide with phosphorothioate linkage
  modified_base 11: mod_base = OTHER; note = Nucleotide with phosphorothioate linkage
  modified_base 12: mod_base = OTHER; note = Nucleotide with phosphorothioate linkage
  modified_base 13: mod_base = OTHER; note = Nucleotide with phosphorothioate linkage
  modified_base 14: mod_base = OTHER; note = Nucleotide with phosphorothioate linkage
  modified_base 15: mod_base = OTHER; note = Nucleotide with phosphorothioate linkage
  modified_base 16: mod_base = OTHER; note = Nucleotide with phosphorothioate linkage
  modified_base 17: mod_base = OTHER; note = beta-D-oxy locked nucleotide with phosphorothioate linkage
  modified_base 18: mod_base = OTHER; note = 5-methyl beta-D-oxy locked nucleotide with phosphorothioate linkage
cactgatccttttacctc

SEQ ID NO: 309 - DNA, 18 bp, synthetic construct
  source 1..18: mol_type = other DNA
  modified_base 1: mod_base = OTHER; note = beta-D-oxy locked nucleotide with phosphorothioate linkage
  modified_base 2: mod_base = OTHER; note = 5-methyl beta-D-oxy locked nucleotide with phosphorothioate linkage
  modified_base 3: mod_base = OTHER; note = Nucleotide with phosphorothioate linkage
  modified_base 4: mod_base = OTHER; note = Nucleotide with phosphorothioate linkage
  modified_base 5: mod_base = OTHER; note = Nucleotide with phosphorothioate linkage
  modified_base 6: mod_base = OTHER; note = Nucleotide with phosphorothioate linkage
  modified_base 7: mod_base = OTHER; note = Nucleotide with phosphorothioate linkage
  modified_base 8: mod_base = OTHER; note = Nucleotide with phosphorothioate linkage
  modified_base 9: mod_base = OTHER; note = Nucleotide with phosphorothioate linkage
  modified_base 10: mod_base = OTHER; note = Nucleotide with phosphorothioate linkage
  modified_base 11: mod_base = OTHER; note = Nucleotide with phosphorothioate linkage
  modified_base 12: mod_base = OTHER; note = Nucleotide with phosphorothioate linkage
  modified_base 13: mod_base = OTHER; note = Nucleotide with phosphorothioate linkage
  modified_base 14: mod_base = OTHER; note = Nucleotide with phosphorothioate linkage
  modified_base 15: mod_base = OTHER; note = Nucleotide with phosphorothioate linkage
  modified_base 16: mod_base = OTHER; note = Nucleotide with phosphorothioate linkage
  modified_base 17: mod_base = OTHER; note = 5-methyl beta-D-oxy locked nucleotide with phosphorothioate linkage
  modified_base 18: mod_base = OTHER; note = beta-D-oxy locked nucleotide with phosphorothioate linkage
acactgatccttttacct

SEQ ID NO: 310 - DNA, 17 bp, synthetic construct
  source 1..17: mol_type = other DNA
  modified_base 1: mod_base = OTHER; note = 5-methyl beta-D-oxy locked nucleotide with phosphorothioate linkage
  modified_base 2: mod_base = OTHER; note = beta-D-oxy locked nucleotide with phosphorothioate linkage
  modified_base 3: mod_base = OTHER; note = Nucleotide with phosphorothioate linkage
  modified_base 4: mod_base = OTHER; note = Nucleotide with phosphorothioate linkage
  modified_base 5: mod_base = OTHER; note = Nucleotide with phosphorothioate linkage
  modified_base 6: mod_base = OTHER; note = Nucleotide with phosphorothioate linkage
  modified_base 7: mod_base = OTHER; note = Nucleotide with phosphorothioate linkage
  modified_base 8: mod_base = OTHER; note = Nucleotide with phosphorothioate linkage
  modified_base 9: mod_base = OTHER; note = Nucleotide with phosphorothioate linkage
  modified_base 10: mod_base = OTHER; note = Nucleotide with phosphorothioate linkage
  modified_base 11: mod_base = OTHER; note = Nucleotide with phosphorothioate linkage
  modified_base 12: mod_base = OTHER; note = Nucleotide with phosphorothioate linkage
  modified_base 13: mod_base = OTHER; note = Nucleotide with phosphorothioate linkage
  modified_base 14: mod_base = OTHER; note = Nucleotide with phosphorothioate linkage
  modified_base 15: mod_base = OTHER; note = Nucleotide with phosphorothioate linkage
  modified_base 16: mod_base = OTHER; note = 5-methyl beta-D-oxy locked nucleotide with phosphorothioate linkage
  modified_base 17: mod_base = OTHER; note = beta-D-oxy locked nucleotide with phosphorothioate linkage
cactgatccttttacct

SEQ ID NO: 311 - DNA, 19 bp, synthetic construct
  source 1..19: mol_type = other DNA
  modified_base 1: mod_base = OTHER; note = beta-D-oxy locked nucleotide with phosphorothioate linkage
  modified_base 2: mod_base = OTHER; note = beta-D-oxy locked nucleotide with phosphorothioate linkage
  modified_base 3: mod_base = OTHER; note = Nucleotide with phosphorothioate linkage
  modified_base 4: mod_base = OTHER; note = Nucleotide with phosphorothioate linkage
  modified_base 5: mod_base = OTHER; note = Nucleotide with phosphorothioate linkage
  modified_base 6: mod_base = OTHER; note = Nucleotide with phosphorothioate linkage
  modified_base 7: mod_base = OTHER; note = Nucleotide with phosphorothioate linkage
  modified_base 8: mod_base = OTHER; note = Nucleotide with phosphorothioate linkage
  modified_base 9: mod_base = OTHER; note = Nucleotide with phosphorothioate linkage
  modified_base 10: mod_base = OTHER; note = Nucleotide with phosphorothioate linkage
  modified_base 11: mod_base = OTHER; note = Nucleotide with phosphorothioate linkage
  modified_base 12: mod_base = OTHER; note = Nucleotide with phosphorothioate linkage
  modified_base 13: mod_base = OTHER; note = Nucleotide with phosphorothioate linkage
  modified_base 14: mod_base = OTHER; note = Nucleotide with phosphorothioate linkage
  modified_base 15: mod_base = OTHER; note = Nucleotide with phosphorothioate linkage
  modified_base 16: mod_base = OTHER; note = Nucleotide with phosphorothioate linkage
  modified_base 17: mod_base = OTHER; note = Nucleotide with phosphorothioate linkage
  modified_base 18: mod_base = OTHER; note = 5-methyl beta-D-oxy locked nucleotide with phosphorothioate linkage
  modified_base 19: mod_base = OTHER; note = beta-D-oxy locked nucleotide with phosphorothioate linkage
aacactgatccttttacct

SEQ ID NO: 312 - DNA, 16 bp, synthetic construct
  source 1..16: mol_type = other DNA
  modified_base 1: mod_base = OTHER; note = 5-methyl beta-D-oxy locked nucleotide with phosphorothioate linkage
  modified_base 2: mod_base = OTHER; note = beta-D-oxy locked nucleotide with phosphorothioate linkage
  modified_base 3: mod_base = OTHER; note = 5-methyl beta-D-oxy locked nucleotide with phosphorothioate linkage
  modified_base 4: mod_base = OTHER; note = Nucleotide with phosphorothioate linkage
  modified_base 5: mod_base = OTHER; note = Nucleotide with phosphorothioate linkage
  modified_base 6: mod_base = OTHER; note = Nucleotide with phosphorothioate linkage
  modified_base 7: mod_base = OTHER; note = Nucleotide with phosphorothioate linkage
  modified_base 8: mod_base = OTHER; note = Nucleotide with phosphorothioate linkage
  modified_base 9: mod_base = OTHER; note = Nucleotide with phosphorothioate linkage
  modified_base 10: mod_base = OTHER; note = Nucleotide with phosphorothioate linkage
  modified_base 11: mod_base = OTHER; note = Nucleotide with phosphorothioate linkage
  modified_base 12: mod_base = OTHER; note = Nucleotide with phosphorothioate linkage
  modified_base 13: mod_base = OTHER; note = Nucleotide with phosphorothioate linkage
  modified_base 14: mod_base = OTHER; note = Nucleotide with phosphorothioate linkage
  modified_base 15: mod_base = OTHER; note = 5-methyl beta-D-oxy locked nucleotide with phosphorothioate linkage
  modified_base 16: mod_base = OTHER; note = 5-methyl beta-D-oxy locked nucleotide with phosphorothioate linkage
cactgatccttttacc

SEQ ID NO: 313 - DNA, 18 bp, synthetic construct
  source 1..18: mol_type = other DNA
  modified_base 1: mod_base = OTHER; note = beta-D-oxy locked nucleotide with phosphorothioate linkage
  modified_base 2: mod_base = OTHER; note = beta-D-oxy locked nucleotide with phosphorothioate linkage
  modified_base 3: mod_base = OTHER; note = Nucleotide with phosphorothioate linkage
  modified_base 4: mod_base = OTHER; note = Nucleotide with phosphorothioate linkage
  modified_base 5: mod_base = OTHER; note = Nucleotide with phosphorothioate linkage
  modified_base 6: mod_base = OTHER; note = Nucleotide with phosphorothioate linkage
  modified_base 7: mod_base = OTHER; note = Nucleotide with phosphorothioate linkage
  modified_base 8: mod_base = OTHER; note = Nucleotide with phosphorothioate linkage
  modified_base 9: mod_base = OTHER; note = Nucleotide with phosphorothioate linkage
  modified_base 10: mod_base = OTHER; note = Nucleotide with phosphorothioate linkage
  modified_base 11: mod_base = OTHER; note = Nucleotide with phosphorothioate linkage
  modified_base 12: mod_base = OTHER; note = Nucleotide with phosphorothioate linkage
  modified_base 13: mod_base = OTHER; note = Nucleotide with phosphorothioate linkage
  modified_base 14: mod_base = OTHER; note = Nucleotide with phosphorothioate linkage
  modified_base 15: mod_base = OTHER; note = Nucleotide with phosphorothioate linkage
  modified_base 16: mod_base = OTHER; note = Nucleotide with phosphorothioate linkage
  modified_base 17: mod_base = OTHER; note = 5-methyl beta-D-oxy locked nucleotide with phosphorothioate linkage
  modified_base 18: mod_base = OTHER; note = 5-methyl beta-D-oxy locked nucleotide with phosphorothioate linkage
aacactgatccttttacc

SEQ ID NO: 314 - DNA, 17 bp, synthetic construct
  source 1..17: mol_type = other DNA
  modified_base 1: mod_base = OTHER; note = beta-D-oxy locked nucleotide with phosphorothioate linkage
  modified_base 2: mod_base = OTHER; note = 5-methyl beta-D-oxy locked nucleotide with phosphorothioate linkage
  modified_base 3: mod_base = OTHER; note = Nucleotide with phosphorothioate linkage
  modified_base 4: mod_base = OTHER; note = Nucleotide with phosphorothioate linkage
  modified_base 5: mod_base = OTHER; note = Nucleotide with phosphorothioate linkage
  modified_base 6: mod_base = OTHER; note = Nucleotide with phosphorothioate linkage
  modified_base 7: mod_base = OTHER; note = Nucleotide with phosphorothioate linkage
  modified_base 8: mod_base = OTHER; note = Nucleotide with phosphorothioate linkage
  modified_base 9: mod_base = OTHER; note = Nucleotide with phosphorothioate linkage
  modified_base 10: mod_base = OTHER; note = Nucleotide with phosphorothioate linkage
  modified_base 11: mod_base = OTHER; note = Nucleotide with phosphorothioate linkage
  modified_base 12: mod_base = OTHER; note = Nucleotide with phosphorothioate linkage
  modified_base 13: mod_base = OTHER; note = Nucleotide with phosphorothioate linkage
  modified_base 14: mod_base = OTHER; note = Nucleotide with phosphorothioate linkage
  modified_base 15: mod_base = OTHER; note = Nucleotide with phosphorothioate linkage
  modified_base 16: mod_base = OTHER; note = 5-methyl beta-D-oxy locked nucleotide with phosphorothioate linkage
  modified_base 17: mod_base = OTHER; note = 5-methyl beta-D-oxy locked nucleotide with phosphorothioate linkage
acactgatccttttacc

SEQ ID NO: 315 - DNA, 17 bp, synthetic construct
  source 1..17: mol_type = other DNA
  modified_base 1: mod_base = OTHER; note = beta-D-oxy locked nucleotide with phosphorothioate linkage
  modified_base 2: mod_base = OTHER; note = beta-D-oxy locked nucleotide with phosphorothioate linkage
  modified_base 3: mod_base = OTHER; note = Nucleotide with phosphorothioate linkage
  modified_base 4: mod_base = OTHER; note = Nucleotide with phosphorothioate linkage
  modified_base 5: mod_base = OTHER; note = Nucleotide with phosphorothioate linkage
  modified_base 6: mod_base = OTHER; note = Nucleotide with phosphorothioate linkage
  modified_base 7: mod_base = OTHER; note = Nucleotide with phosphorothioate linkage
  modified_base 8: mod_base = OTHER; note = Nucleotide with phosphorothioate linkage
  modified_base 9: mod_base = OTHER; note = Nucleotide with phosphorothioate linkage
  modified_base 10: mod_base = OTHER; note = Nucleotide with phosphorothioate linkage
  modified_base 11: mod_base = OTHER; note = Nucleotide with phosphorothioate linkage
  modified_base 12: mod_base = OTHER; note = Nucleotide with phosphorothioate linkage
  modified_base 13: mod_base = OTHER; note = Nucleotide with phosphorothioate linkage
  modified_base 14: mod_base = OTHER; note = Nucleotide with phosphorothioate linkage
  modified_base 15: mod_base = OTHER; note = Nucleotide with phosphorothioate linkage
  modified_base 16: mod_base = OTHER; note = 5-methyl beta-D-oxy locked nucleotide with phosphorothioate linkage
  modified_base 17: mod_base = OTHER; note = 5-methyl beta-D-oxy locked nucleotide with phosphorothioate linkage
agcacaaagtcatctcc

SEQ ID NO: 316 - DNA, 16 bp, synthetic construct
  source 1..16: mol_type = other DNA
  modified_base 1: mod_base = OTHER; note = beta-D-oxy locked nucleotide with phosphorothioate linkage
  modified_base 2: mod_base = OTHER; note = 5-methyl beta-D-oxy locked nucleotide with phosphorothioate linkage
  modified_base 3: mod_base = OTHER; note = beta-D-oxy locked nucleotide with phosphorothioate linkage
  modified_base 4: mod_base = OTHER; note = 5-methyl beta-D-oxy locked nucleotide with phosphorothioate linkage
  modified_base 5: mod_base = OTHER; note = Nucleotide with phosphorothioate linkage
  modified_base 6: mod_base = OTHER; note = Nucleotide with phosphorothioate linkage
  modified_base 7: mod_base = OTHER; note = Nucleotide with phosphorothioate linkage
  modified_base 8: mod_base = OTHER; note = Nucleotide with phosphorothioate linkage
  modified_base 9: mod_base = OTHER; note = Nucleotide with phosphorothioate linkage
  modified_base 10: mod_base = OTHER; note = Nucleotide with phosphorothioate linkage
  modified_base 11: mod_base = OTHER; note = Nucleotide with phosphorothioate linkage
  modified_base 12: mod_base = OTHER; note = Nucleotide with phosphorothioate linkage
  modified_base 13: mod_base = OTHER; note = Nucleotide with phosphorothioate linkage
  modified_base 14: mod_base = OTHER; note = Nucleotide with phosphorothioate linkage
  modified_base 15: mod_base = OTHER; note = 5-methyl beta-D-oxy locked nucleotide with phosphorothioate linkage
  modified_base 16: mod_base = OTHER; note = 5-methyl beta-D-oxy locked nucleotide with phosphorothioate linkage
tcacataacaagctcc

SEQ ID NO: 317 - DNA, 17 bp, synthetic construct
  source 1..17: mol_type = other DNA
  modified_base 1: mod_base = OTHER; note = 5-methyl beta-D-oxy locked nucleotide with phosphorothioate linkage
  modified_base 2: mod_base = OTHER; note = 5-methyl beta-D-oxy locked nucleotide with phosphorothioate linkage
  modified_base 3: mod_base = OTHER; note = beta-D-oxy locked nucleotide with phosphorothioate linkage
  modified_base 4: mod_base = OTHER; note = beta-D-oxy locked nucleotide with phosphorothioate linkage
  modified_base 5: mod_base = OTHER; note = Nucleotide with phosphorothioate linkage
  modified_base 6: mod_base = OTHER; note = Nucleotide with phosphorothioate linkage
  modified_base 7: mod_base = OTHER; note = Nucleotide with phosphorothioate linkage
  modified_base 8: mod_base = OTHER; note = Nucleotide with phosphorothioate linkage
  modified_base 9: mod_base = OTHER; note = Nucleotide with phosphorothioate linkage
  modified_base 10: mod_base = OTHER; note = Nucleotide with phosphorothioate linkage
  modified_base 11: mod_base = OTHER; note = Nucleotide with phosphorothioate linkage
  modified_base 12: mod_base = OTHER; note = Nucleotide with phosphorothioate linkage
  modified_base 13: mod_base = OTHER; note = Nucleotide with phosphorothioate linkage
  modified_base 14: mod_base = OTHER; note = beta-D-oxy locked nucleotide with phosphorothioate linkage
  modified_base 15: mod_base = OTHER; note = 5-methyl beta-D-oxy locked nucleotide with phosphorothioate linkage
  modified_base 16: mod_base = OTHER; note = beta-D-oxy locked nucleotide with phosphorothioate linkage
  modified_base 17: mod_base = OTHER; note = beta-D-oxy locked nucleotide with phosphorothioate linkage
cctatgtcacataacaa

SEQ ID NO: 318 - DNA, 17 bp, synthetic construct
  source 1..17: mol_type = other DNA
  modified_base 1: mod_base = OTHER; note = beta-D-oxy locked nucleotide with phosphorothioate linkage
  modified_base 2: mod_base = OTHER; note = 5-methyl beta-D-oxy locked nucleotide with phosphorothioate linkage
  modified_base 3: mod_base = OTHER; note = Nucleotide with phosphorothioate linkage
  modified_base 4: mod_base = OTHER; note = Nucleotide with phosphorothioate linkage
  modified_base 5: mod_base = OTHER; note = Nucleotide with phosphorothioate linkage
  modified_base 6: mod_base = OTHER; note = Nucleotide with phosphorothioate linkage
  modified_base 7: mod_base = OTHER; note = Nucleotide with phosphorothioate linkage
  modified_base 8: mod_base = OTHER; note = Nucleotide with phosphorothioate linkage
  modified_base 9: mod_base = OTHER; note = Nucleotide with phosphorothioate linkage
  modified_base 10: mod_base = OTHER; note = Nucleotide with phosphorothioate linkage
  modified_base 11: mod_base = OTHER; note = Nucleotide with phosphorothioate linkage
  modified_base 12: mod_base = OTHER; note = Nucleotide with phosphorothioate linkage
  modified_base 13: mod_base = OTHER; note = Nucleotide with phosphorothioate linkage
  modified_base 14: mod_base = OTHER; note = Nucleotide with phosphorothioate linkage
  modified_base 15: mod_base = OTHER; note = Nucleotide with phosphorothioate linkage
  modified_base 16: mod_base = OTHER; note = 5-methyl beta-D-oxy locked nucleotide with phosphorothioate linkage
  modified_base 17: mod_base = OTHER; note = beta-D-oxy locked nucleotide with phosphorothioate linkage
gcctatgtcacataaca

SEQ ID NO: 319 - DNA, 17 bp, synthetic construct
  source 1..17: mol_type = other DNA
  modified_base 1: mod_base = OTHER; note = beta-D-oxy locked nucleotide with phosphorothioate linkage
  modified_base 2: mod_base = OTHER; note = beta-D-oxy locked nucleotide with phosphorothioate linkage
  modified_base 3: mod_base = OTHER; note = Nucleotide with phosphorothioate linkage
  modified_base 4: mod_base = OTHER; note = Nucleotide with phosphorothioate linkage
  modified_base 5: mod_base = OTHER; note = Nucleotide with phosphorothioate linkage
  modified_base 6: mod_base = OTHER; note = Nucleotide with phosphorothioate linkage
  modified_base 7: mod_base = OTHER; note = Nucleotide with phosphorothioate linkage
  modified_base 8: mod_base = OTHER; note = Nucleotide with phosphorothioate linkage
  modified_base 9: mod_base = OTHER; note = Nucleotide with phosphorothioate linkage
  modified_base 10: mod_base = OTHER; note = Nucleotide with phosphorothioate linkage
  modified_base 11: mod_base = OTHER; note = Nucleotide with phosphorothioate linkage
  modified_base 12: mod_base = OTHER; note = Nucleotide with phosphorothioate linkage
  modified_base 13: mod_base = OTHER; note = Nucleotide with phosphorothioate linkage
  modified_base 14: mod_base = OTHER; note = beta-D-oxy locked nucleotide with phosphorothioate linkage
  modified_base 15: mod_base = OTHER; note = beta-D-oxy locked nucleotide with phosphorothioate linkage
  modified_base 16: mod_base = OTHER; note = beta-D-oxy locked nucleotide with phosphorothioate linkage
  modified_base 17: mod_base = OTHER; note = 5-methyl beta-D-oxy locked nucleotide with phosphorothioate linkage
agcctatgtcacataac

SEQ ID NO: 320 - DNA, 21 bp, synthetic construct
  source 1..21: mol_type = other DNA
  modified_base 1: mod_base = OTHER; note = beta-D-oxy locked nucleotide with phosphorothioate linkage
  modified_base 2: mod_base = OTHER; note = beta-D-oxy locked nucleotide with phosphorothioate linkage
  modified_base 3: mod_base = OTHER; note = 5-methyl beta-D-oxy locked nucleotide with phosphorothioate linkage
  modified_base 4: mod_base = OTHER; note = beta-D-oxy locked nucleotide with phosphorothioate linkage
  modified_base 5: mod_base = OTHER; note = Nucleotide with phosphorothioate linkage
  modified_base 6: mod_base = OTHER; note = Nucleotide with phosphorothioate linkage
  modified_base 7: mod_base = OTHER; note = Nucleotide with phosphorothioate linkage
  modified_base 8: mod_base = OTHER; note = Nucleotide with phosphorothioate linkage
  modified_base 9: mod_base = OTHER; note = Nucleotide with phosphorothioate linkage
  modified_base 10: mod_base = OTHER; note = Nucleotide with phosphorothioate linkage
  modified_base 11: mod_base = OTHER; note = Nucleotide with phosphorothioate linkage
  modified_base 12: mod_base = OTHER; note = Nucleotide with phosphorothioate linkage
  modified_base 13: mod_base = OTHER; note = Nucleotide with phosphorothioate linkage
  modified_base 14: mod_base = OTHER; note = Nucleotide with phosphorothioate linkage
  modified_base 15: mod_base = OTHER; note = Nucleotide with phosphorothioate linkage
  modified_base 16: mod_base = OTHER; note = Nucleotide with phosphorothioate linkage
  modified_base 17: mod_base = OTHER; note = Nucleotide with phosphorothioate linkage
  modified_base 18: mod_base = OTHER; note = beta-D-oxy locked nucleotide with phosphorothioate linkage
  modified_base 19: mod_base = OTHER; note = beta-D-oxy locked nucleotide with phosphorothioate linkage
  modified_base 20: mod_base = OTHER; note = beta-D-oxy locked nucleotide with phosphorothioate linkage
  modified_base 21: mod_base = OTHER; note = 5-methyl beta-D-oxy locked nucleotide with phosphorothioate linkage
agcaaaactaaacaataaaac

SEQ ID NO: 321 - DNA, 19 bp, synthetic construct
  source 1..19: mol_type = other DNA
  modified_base 1: mod_base = OTHER; note = beta-D-oxy locked nucleotide with phosphorothioate linkage
  modified_base 2: mod_base = OTHER; note = beta-D-oxy locked nucleotide with phosphorothioate linkage
  modified_base 3: mod_base = OTHER; note = 5-methyl beta-D-oxy locked nucleotide with phosphorothioate linkage
  modified_base 4: mod_base = OTHER; note = beta-D-oxy locked nucleotide with phosphorothioate linkage
  modified_base 5: mod_base = OTHER; note = Nucleotide with phosphorothioate linkage
  modified_base 6: mod_base = OTHER; note = Nucleotide with phosphorothioate linkage
  modified_base 7: mod_base = OTHER; note = Nucleotide with phosphorothioate linkage
  modified_base 8: mod_base = OTHER; note = Nucleotide with phosphorothioate linkage
  modified_base 9: mod_base = OTHER; note = Nucleotide with phosphorothioate linkage
  modified_base 10: mod_base = OTHER; note = Nucleotide with phosphorothioate linkage
  modified_base 11: mod_base = OTHER; note = Nucleotide with phosphorothioate linkage
  modified_base 12: mod_base = OTHER; note = Nucleotide with phosphorothioate linkage
  modified_base 13: mod_base = OTHER; note = Nucleotide with phosphorothioate linkage
  modified_base 14: mod_base = OTHER; note = Nucleotide with phosphorothioate linkage
  modified_base 15: mod_base = OTHER; note = Nucleotide with phosphorothioate linkage
  modified_base 16: mod_base = OTHER; note = beta-D-oxy locked nucleotide with phosphorothioate linkage
  modified_base 17: mod_base = OTHER; note = beta-D-oxy locked nucleotide with phosphorothioate linkage
  modified_base 18: mod_base = OTHER; note = beta-D-oxy locked nucleotide with phosphorothioate linkage
  modified_base 19: mod_base = OTHER; note = beta-D-oxy locked nucleotide with phosphorothioate linkage
agcaaaactaaacaataaa

SEQ ID NO: 322 - DNA, 16 bp, synthetic construct
  source 1..16: mol_type = other DNA
  modified_base 1: mod_base = OTHER; note = beta-D-oxy locked nucleotide with phosphorothioate linkage
  modified_base 2: mod_base = OTHER; note = beta-D-oxy locked nucleotide with phosphorothioate linkage
  modified_base 3: mod_base = OTHER; note = Nucleotide with phosphorothioate linkage
  modified_base 4: mod_base = OTHER; note = Nucleotide with phosphorothioate linkage
  modified_base 5: mod_base = OTHER; note = Nucleotide with phosphorothioate linkage
  modified_base 6: mod_base = OTHER; note = Nucleotide with phosphorothioate linkage
  modified_base 7: mod_base = OTHER; note = Nucleotide with phosphorothioate linkage
  modified_base 8: mod_base = OTHER; note = Nucleotide with phosphorothioate linkage
  modified_base 9: mod_base = OTHER; note = Nucleotide with phosphorothioate linkage
  modified_base 10: mod_base = OTHER; note = Nucleotide with phosphorothioate linkage
  modified_base 11: mod_base = OTHER; note = Nucleotide with phosphorothioate linkage
  modified_base 12: mod_base = OTHER; note = Nucleotide with phosphorothioate linkage
  modified_base 13: mod_base = OTHER; note = Nucleotide with phosphorothioate linkage
  modified_base 14: mod_base = OTHER; note = 5-methyl beta-D-oxy locked nucleotide with phosphorothioate linkage
  modified_base 15: mod_base = OTHER; note = 5-methyl beta-D-oxy locked nucleotide with phosphorothioate linkage
  modified_base 16: mod_base = OTHER; note = 5-methyl beta-D-oxy locked nucleotide with phosphorothioate linkage
aatctaggttacaccc

SEQ ID NO: 323 - DNA, 15 bp, synthetic construct
  source 1..15: mol_type = other DNA
  modified_base 1: mod_base = OTHER; note = 5-methyl beta-D-oxy locked nucleotide with phosphorothioate linkage
  modified_base 2: mod_base = OTHER; note = 5-methyl beta-D-oxy locked nucleotide with phosphorothioate linkage
  modified_base 3: mod_base = OTHER; note = beta-D-oxy locked nucleotide with phosphorothioate linkage
  modified_base 4: mod_base = OTHER; note = beta-D-oxy locked nucleotide with phosphorothioate linkage
  modified_base 5: mod_base = OTHER; note = Nucleotide with phosphorothioate linkage
  modified_base 6: mod_base = OTHER; note = Nucleotide with phosphorothioate linkage
  modified_base 7: mod_base = OTHER; note = Nucleotide with phosphorothioate linkage
  modified_base 8: mod_base = OTHER; note = Nucleotide with phosphorothioate linkage
  modified_base 9: mod_base = OTHER; note = Nucleotide with phosphorothioate linkage
  modified_base 10: mod_base = OTHER; note = Nucleotide with phosphorothioate linkage
  modified_base 11: mod_base = OTHER; note = Nucleotide with phosphorothioate linkage
  modified_base 12: mod_base = OTHER; note = 5-methyl beta-D-oxy locked nucleotide with phosphorothioate linkage
  modified_base 13: mod_base = OTHER; note = beta-D-oxy locked nucleotide with phosphorothioate linkage
  modified_base 14: mod_base = OTHER; note = beta-D-oxy locked nucleotide with phosphorothioate linkage
  modified_base 15: mod_base = OTHER; note = beta-D-oxy locked nucleotide with phosphorothioate linkage
ccgataacgaactaa

SEQ ID NO: 324 - DNA, 15 bp, synthetic construct
  source 1..15: mol_type = other DNA
  modified_base 1: mod_base = OTHER; note = beta-D-oxy locked nucleotide with phosphorothioate linkage
  modified_base 2: mod_base = OTHER; note = 5-methyl beta-D-oxy locked nucleotide with phosphorothioate linkage
  modified_base 3: mod_base = OTHER; note = 5-methyl beta-D-oxy locked nucleotide with phosphorothioate linkage
  modified_base 4: mod_base = OTHER; note = Nucleotide with phosphorothioate linkage
  modified_base 5: mod_base = OTHER; note = Nucleotide with phosphorothioate linkage
  modified_base 6: mod_base = OTHER; note = Nucleotide with phosphorothioate linkage
  modified_base 7: mod_base = OTHER; note = Nucleotide with phosphorothioate linkage
  modified_base 8: mod_base = OTHER; note = Nucleotide with phosphorothioate linkage
  modified_base 9: mod_base = OTHER; note = Nucleotide with phosphorothioate linkage
  modified_base 10: mod_base = OTHER; note = Nucleotide with phosphorothioate linkage
  modified_base 11: mod_base = OTHER; note = Nucleotide with phosphorothioate linkage
  modified_base 12: mod_base = OTHER; note = beta-D-oxy locked nucleotide with phosphorothioate linkage
  modified_base 13: mod_base = OTHER; note = beta-D-oxy locked nucleotide with phosphorothioate linkage
  modified_base 14: mod_base = OTHER; note = 5-methyl beta-D-oxy locked nucleotide with phosphorothioate linkage
  modified_base 15: mod_base = OTHER; note = beta-D-oxy locked nucleotide with phosphorothioate linkage
acccgataacgaact

SEQ ID NO: 325 - DNA, 15 bp, synthetic construct
  source 1..15: mol_type = other DNA
  modified_base 1: mod_base = OTHER; note = 5-methyl beta-D-oxy locked nucleotide with phosphorothioate linkage
  modified_base 2: mod_base = OTHER; note = beta-D-oxy locked nucleotide with phosphorothioate linkage
  modified_base 3: mod_base = OTHER; note = 5-methyl beta-D-oxy locked nucleotide with phosphorothioate linkage
  modified_base 4: mod_base = OTHER; note = Nucleotide with phosphorothioate linkage
  modified_base 5: mod_base = OTHER; note = Nucleotide with phosphorothioate linkage
  modified_base 6: mod_base = OTHER; note = Nucleotide with phosphorothioate linkage
  modified_base 7: mod_base = OTHER; note = Nucleotide with phosphorothioate linkage
  modified_base 8: mod_base = OTHER; note = Nucleotide with phosphorothioate linkage
  modified_base 9: mod_base = OTHER; note = Nucleotide with phosphorothioate linkage
  modified_base 10: mod_base = OTHER; note = Nucleotide with phosphorothioate linkage
  modified_base 11: mod_base = OTHER; note = Nucleotide with phosphorothioate linkage
  modified_base 12: mod_base = OTHER; note = Nucleotide with phosphorothioate linkage
  modified_base 13: mod_base = OTHER; note = Nucleotide with phosphorothioate linkage
  modified_base 14: mod_base = OTHER; note = 5-methyl beta-D-oxy locked nucleotide with phosphorothioate linkage
  modified_base 15: mod_base = OTHER; note = 5-methyl beta-D-oxy locked nucleotide with phosphorothioate linkage
cgcatcttttgatcc

SEQ ID NO: 326 - DNA, 19 bp, synthetic construct
  source 1..19: mol_type = other DNA
  modified_base 1: mod_base = OTHER; note = beta-D-oxy locked nucleotide with phosphorothioate linkage
  modified_base 2: mod_base = OTHER; note = beta-D-oxy locked nucleotide with phosphorothioate linkage
  modified_base 3: mod_base = OTHER; note = beta-D-oxy locked nucleotide with phosphorothioate linkage
  modified_base 4: mod_base = OTHER; note = Nucleotide with phosphorothioate linkage
  modified_base 5: mod_base = OTHER; note = Nucleotide with phosphorothioate linkage
  modified_base 6: mod_base = OTHER; note = Nucleotide with phosphorothioate linkage
  modified_base 7: mod_base = OTHER; note = Nucleotide with phosphorothioate linkage
  modified_base 8: mod_base = OTHER; note = Nucleotide with phosphorothioate linkage
  modified_base 9: mod_base = OTHER; note = Nucleotide with phosphorothioate linkage
  modified_base 10: mod_base = OTHER; note = Nucleotide with phosphorothioate linkage
  modified_base 11: mod_base = OTHER; note = Nucleotide with phosphorothioate linkage
  modified_base 12: mod_base = OTHER; note = Nucleotide with phosphorothioate linkage
  modified_base 13: mod_base = OTHER; note = Nucleotide with phosphorothioate linkage
  modified_base 14: mod_base = OTHER; note = Nucleotide with phosphorothioate linkage
  modified_base 15: mod_base = OTHER; note = Nucleotide with phosphorothioate linkage
  modified_base 16: mod_base = OTHER; note = beta-D-oxy locked nucleotide with phosphorothioate linkage
  modified_base 17: mod_base = OTHER; note = 5-methyl beta-D-oxy locked nucleotide with phosphorothioate linkage
  modified_base 18: mod_base = OTHER; note = beta-D-oxy locked nucleotide with phosphorothioate linkage
  modified_base 19: mod_base = OTHER; note = beta-D-oxy locked nucleotide with phosphorothioate linkage
aagtaaatatctccttctt

SEQ ID NO: 327 - DNA, 18 bp, synthetic construct
  source 1..18: mol_type = other DNA
  modified_base 1: mod_base = OTHER; note = beta-D-oxy locked nucleotide with phosphorothioate linkage
  modified_base 2: mod_base = OTHER; note = beta-D-oxy locked nucleotide with phosphorothioate linkage
  modified_base 3: mod_base = OTHER; note = beta-D-oxy locked nucleotide with phosphorothioate linkage
  modified_base 4: mod_base = OTHER; note = Nucleotide with phosphorothioate linkage
  modified_base 5: mod_base = OTHER; note = Nucleotide with phosphorothioate linkage
  modified_base 6: mod_base = OTHER; note = Nucleotide with phosphorothioate linkage
  modified_base 7: mod_base = OTHER; note = Nucleotide with phosphorothioate linkage
  modified_base 8: mod_base = OTHER; note = Nucleotide with phosphorothioate linkage
  modified_base 9: mod_base = OTHER; note = Nucleotide with phosphorothioate linkage
  modified_base 10: mod_base = OTHER; note = Nucleotide with phosphorothioate linkage
  modified_base 11: mod_base = OTHER; note = Nucleotide with phosphorothioate linkage
  modified_base 12: mod_base = OTHER; note = Nucleotide with phosphorothioate linkage
  modified_base 13: mod_base = OTHER; note = Nucleotide with phosphorothioate linkage
  modified_base 14: mod_base = OTHER; note = Nucleotide with phosphorothioate linkage
  modified_base 15: mod_base = OTHER; note = beta-D-oxy locked nucleotide with phosphorothioate linkage
  modified_base 16: mod_base = OTHER; note = beta-D-oxy locked nucleotide with phosphorothioate linkage
  modified_base 17: mod_base = OTHER; note = 5-methyl beta-D-oxy locked nucleotide with phosphorothioate linkage
  modified_base 18: mod_base = OTHER; note = beta-D-oxy locked nucleotide with phosphorothioate linkage
aagtaaatatctccttct

SEQ ID NO: 328 - DNA, 17 bp, synthetic construct
  source 1..17: mol_type = other DNA
  modified_base 1: mod_base = OTHER; note = beta-D-oxy locked nucleotide with phosphorothioate linkage
  modified_base 2: mod_base = OTHER; note = beta-D-oxy locked nucleotide with phosphorothioate linkage
  modified_base 3: mod_base = OTHER; note = beta-D-oxy locked nucleotide with phosphorothioate linkage
  modified_base 4: mod_base = OTHER; note = Nucleotide with phosphorothioate linkage
  modified_base 5: mod_base = OTHER; note = Nucleotide with phosphorothioate linkage
  modified_base 6: mod_base = OTHER; note = Nucleotide with phosphorothioate linkage
  modified_base 7: mod_base = OTHER; note = Nucleotide with phosphorothioate linkage
  modified_base 8: mod_base = OTHER; note = Nucleotide with phosphorothioate linkage
  modified_base 9: mod_base = OTHER; note = Nucleotide with phosphorothioate linkage
  modified_base 10: mod_base = OTHER; note = Nucleotide with phosphorothioate linkage
  modified_base 11: mod_base = OTHER; note = Nucleotide with phosphorothioate linkage
  modified_base 12: mod_base = OTHER; note = Nucleotide with phosphorothioate linkage
  modified_base 13: mod_base = OTHER; note = Nucleotide with phosphorothioate linkage
  modified_base 14: mod_base = OTHER; note = 5-methyl beta-D-oxy locked nucleotide with phosphorothioate linkage
  modified_base 15: mod_base = OTHER; note = beta-D-oxy locked nucleotide with phosphorothioate linkage
  modified_base 16: mod_base = OTHER; note = beta-D-oxy locked nucleotide with phosphorothioate linkage
  modified_base 17: mod_base = OTHER; note = 5-methyl beta-D-oxy locked nucleotide with phosphorothioate linkage
aagtaaatatctccttc

SEQ ID NO: 329 - DNA, 18 bp, synthetic construct
  source 1..18: mol_type = other DNA
  modified_base 1: mod_base = OTHER; note = beta-D-oxy locked nucleotide with phosphorothioate linkage
  modified_base 2: mod_base = OTHER; note = beta-D-oxy locked nucleotide with phosphorothioate linkage
  modified_base 3: mod_base = OTHER; note = beta-D-oxy locked nucleotide with phosphorothioate linkage
  modified_base 4: mod_base = OTHER; note = beta-D-oxy locked nucleotide with phosphorothioate linkage
  modified_base 5: mod_base = OTHER; note = Nucleotide with phosphorothioate linkage
  modified_base 6: mod_base = OTHER; note = Nucleotide with phosphorothioate linkage
  modified_base 7: mod_base = OTHER; note = Nucleotide with phosphorothioate linkage
  modified_base 8: mod_base = OTHER; note = Nucleotide with phosphorothioate linkage
  modified_base 9: mod_base = OTHER; note = Nucleotide with phosphorothioate linkage
  modified_base 10: mod_base = OTHER; note = Nucleotide with phosphorothioate linkage
  modified_base 11: mod_base = OTHER; note = Nucleotide with phosphorothioate linkage
  modified_base 12: mod_base = OTHER; note = Nucleotide with phosphorothioate linkage
  modified_base 13: mod_base = OTHER; note = Nucleotide with phosphorothioate linkage
  modified_base 14: mod_base = OTHER; note = Nucleotide with phosphorothioate linkage
  modified_base 15: mod_base = OTHER; note = Nucleotide with phosphorothioate linkage
  modified_base 16: mod_base = OTHER; note = beta-D-oxy locked nucleotide with phosphorothioate linkage
  modified_base 17: mod_base = OTHER; note = beta-D-oxy locked nucleotide with phosphorothioate linkage
  modified_base 18: mod_base = OTHER; note = 5-methyl beta-D-oxy locked nucleotide with phosphorothioate linkage
gaagtaaatatctccttc

SEQ ID NO: 330 - DNA, 17 bp, synthetic construct
  source 1..17: mol_type = other DNA
  modified_base 1: mod_base = OTHER; note = beta-D-oxy locked nucleotide with phosphorothioate linkage
  modified_base 2: mod_base = OTHER; note = 5-methyl beta-D-oxy locked nucleotide with phosphorothioate linkage
  modified_base 3: mod_base = OTHER; note = 5-methyl beta-D-oxy locked nucleotide with phosphorothioate linkage
  modified_base 4: mod_base = OTHER; note = Nucleotide with phosphorothioate linkage
  modified_base 5: mod_base = OTHER; note = Nucleotide with phosphorothioate linkage
  modified_base 6: mod_base = OTHER; note = Nucleotide with phosphorothioate linkage
  modified_base 7: mod_base = OTHER; note = Nucleotide with phosphorothioate linkage
  modified_base 8: mod_base = OTHER; note = Nucleotide with phosphorothioate linkage
  modified_base 9: mod_base = OTHER; note = Nucleotide with phosphorothioate linkage
  modified_base 10: mod_base = OTHER; note = Nucleotide with phosphorothioate linkage
  modified_base 11: mod_base = OTHER; note = Nucleotide with phosphorothioate linkage
  modified_base 12: mod_base = OTHER; note = Nucleotide with phosphorothioate linkage
  modified_base 13: mod_base = OTHER; note = Nucleotide with phosphorothioate linkage
  modified_base 14: mod_base = OTHER; note = Nucleotide with phosphorothioate linkage
  modified_base 15: mod_base = OTHER; note = Nucleotide with phosphorothioate linkage
  modified_base 16: mod_base = OTHER; note = beta-D-oxy locked nucleotide with phosphorothioate linkage
  modified_base 17: mod_base = OTHER; note = beta-D-oxy locked nucleotide with phosphorothioate linkage
acccatagacaacttta

SEQ ID NO: 331 - DNA, 18 bp, synthetic construct
  source 1..18: mol_type = other DNA
  modified_base 1: mod_base = OTHER; note = 5-methyl beta-D-oxy locked nucleotide with phosphorothioate linkage
  modified_base 2: mod_base = OTHER; note = beta-D-oxy locked nucleotide with phosphorothioate linkage
  modified_base 3: mod_base = OTHER; note = Nucleotide with phosphorothioate linkage
  modified_base 4: mod_base = OTHER; note = Nucleotide with phosphorothioate linkage
  modified_base 5: mod_base = OTHER; note = Nucleotide with phosphorothioate linkage
  modified_base 6: mod_base = OTHER; note = Nucleotide with phosphorothioate linkage
  modified_base 7: mod_base = OTHER; note = Nucleotide with phosphorothioate linkage
  modified_base 8: mod_base = OTHER; note = Nucleotide with phosphorothioate linkage
  modified_base 9: mod_base = OTHER; note = Nucleotide with phosphorothioate linkage
  modified_base 10: mod_base = OTHER; note = Nucleotide with phosphorothioate linkage
  modified_base 11: mod_base = OTHER; note = Nucleotide with phosphorothioate linkage
  modified_base 12: mod_base = OTHER; note = Nucleotide with phosphorothioate linkage
  modified_base 13: mod_base = OTHER; note = Nucleotide with phosphorothioate linkage
  modified_base 14: mod_base = OTHER; note = Nucleotide with phosphorothioate linkage
  modified_base 15: mod_base = OTHER; note = Nucleotide with phosphorothioate linkage
  modified_base 16: mod_base = OTHER; note = Nucleotide with phosphorothioate linkage
  modified_base 17: mod_base = OTHER; note = beta-D-oxy locked nucleotide with phosphorothioate linkage
  modified_base 18: mod_base = OTHER; note = beta-D-oxy locked nucleotide with phosphorothioate linkage
cacccatagacaacttta

SEQ ID NO: 332 - DNA, 17 bp, synthetic construct
  source 1..17: mol_type = other DNA
  modified_base 1: mod_base = OTHER; note = 5-methyl beta-D-oxy locked nucleotide with phosphorothioate linkage
  modified_base 2: mod_base = OTHER; note = beta-D-oxy locked nucleotide with phosphorothioate linkage
  modified_base 3: mod_base = OTHER; note = 5-methyl beta-D-oxy locked nucleotide with phosphorothioate linkage
  modified_base 4: mod_base = OTHER; note = 5-methyl beta-D-oxy locked nucleotide with phosphorothioate linkage
  modified_base 5: mod_base = OTHER; note = Nucleotide with phosphorothioate linkage
  modified_base 6: mod_base = OTHER; note = Nucleotide with phosphorothioate linkage
  modified_base 7: mod_base = OTHER; note = Nucleotide with phosphorothioate linkage
  modified_base 8: mod_base = OTHER; note = Nucleotide with phosphorothioate linkage
  modified_base 9: mod_base = OTHER; note = Nucleotide with phosphorothioate linkage
  modified_base 10: mod_base = OTHER; note = Nucleotide with phosphorothioate linkage
  modified_base 11: mod_base = OTHER; note = Nucleotide with phosphorothioate linkage
  modified_base 12: mod_base = OTHER; note = Nucleotide with phosphorothioate linkage
  modified_base 13: mod_base = OTHER; note = Nucleotide with phosphorothioate linkage
  modified_base 14: mod_base = OTHER; note = Nucleotide with phosphorothioate linkage
  modified_base 15: mod_base = OTHER; note = Nucleotide with phosphorothioate linkage
  modified_base 16: mod_base = OTHER; note = beta-D-oxy locked nucleotide with phosphorothioate linkage
  modified_base 17: mod_base = OTHER; note = beta-D-oxy locked nucleotide with phosphorothioate linkage
cacccatagacaacttt

SEQ ID NO: 333 - DNA, 17 bp, synthetic construct
  source 1..17: mol_type = other DNA
  modified_base 1: mod_base = OTHER; note = 5-methyl beta-D-oxy locked nucleotide with phosphorothioate linkage
  modified_base 2: mod_base = OTHER; note = 5-methyl beta-D-oxy locked nucleotide with phosphorothioate linkage
  modified_base 3: mod_base = OTHER; note = Nucleotide with phosphorothioate linkage
  modified_base 4: mod_base = OTHER; note = Nucleotide with phosphorothioate linkage
  modified_base 5: mod_base = OTHER; note = Nucleotide with phosphorothioate linkage
  modified_base 6: mod_base = OTHER; note = Nucleotide with phosphorothioate linkage
  modified_base 7: mod_base = OTHER; note = Nucleotide with phosphorothioate linkage
  modified_base 8: mod_base = OTHER; note = Nucleotide with phosphorothioate linkage
  modified_base 9: mod_base = OTHER; note = Nucleotide with phosphorothioate linkage
  modified_base 10: mod_base = OTHER; note = Nucleotide with phosphorothioate linkage
  modified_base 11: mod_base = OTHER; note = Nucleotide with phosphorothioate linkage
  modified_base 12: mod_base = OTHER; note = Nucleotide with phosphorothioate linkage
  modified_base 13: mod_base = OTHER; note = Nucleotide with phosphorothioate linkage
  modified_base 14: mod_base = OTHER; note = Nucleotide with phosphorothioate linkage
  modified_base 15: mod_base = OTHER; note = Nucleotide with phosphorothioate linkage
  modified_base 16: mod_base = OTHER; note = beta-D-oxy locked nucleotide with phosphorothioate linkage
  modified_base 17: mod_base = OTHER; note = beta-D-oxy locked nucleotide with phosphorothioate linkage
ccacccatagacaactt

SEQ ID NO: 334 - DNA, 16 bp, synthetic construct
  source 1..16: mol_type = other DNA
  modified_base 1: mod_base = OTHER; note = 5-methyl beta-D-oxy locked nucleotide with phosphorothioate linkage
  modified_base 2: mod_base = OTHER; note = beta-D-oxy locked nucleotide with phosphorothioate linkage
  modified_base 3: mod_base = OTHER; note = 5-methyl beta-D-oxy locked nucleotide with phosphorothioate linkage
  modified_base 4: mod_base = OTHER; note = Nucleotide with phosphorothioate linkage
  modified_base 5: mod_base = OTHER; note = Nucleotide with phosphorothioate linkage
  modified_base 6: mod_base = OTHER; note = Nucleotide with phosphorothioate linkage
  modified_base 7: mod_base = OTHER; note = Nucleotide with phosphorothioate linkage
  modified_base 8: mod_base = OTHER; note = Nucleotide with phosphorothioate linkage
  modified_base 9: mod_base = OTHER; note = Nucleotide with phosphorothioate linkage
  modified_base 10: mod_base = OTHER; note = Nucleotide with phosphorothioate linkage
  modified_base 11: mod_base = OTHER; note = Nucleotide with phosphorothioate linkage
  modified_base 12: mod_base = OTHER; note = Nucleotide with phosphorothioate linkage
  modified_base 13: mod_base = OTHER; note = Nucleotide with phosphorothioate linkage
  modified_base 14: mod_base = OTHER; note = Nucleotide with phosphorothioate linkage
  modified_base 15: mod_base = OTHER; note = beta-D-oxy locked nucleotide with phosphorothioate linkage
  modified_base 16: mod_base = OTHER; note = beta-D-oxy locked nucleotide with phosphorothioate linkage
cacccatagacaactt

SEQ ID NO: 335 - DNA, 16 bp, synthetic construct
  source 1..16: mol_type = other DNA
  modified_base 1: mod_base = OTHER; note = 5-methyl beta-D-oxy locked nucleotide with phosphorothioate linkage
  modified_base 2: mod_base = OTHER; note = 5-methyl beta-D-oxy locked nucleotide with phosphorothioate linkage
  modified_base 3: mod_base = OTHER; note = Nucleotide with phosphorothioate linkage
  modified_base 4: mod_base = OTHER; note = Nucleotide with phosphorothioate linkage
  modified_base 5: mod_base = OTHER; note = Nucleotide with phosphorothioate linkage
  modified_base 6: mod_base = OTHER; note = Nucleotide with phosphorothioate linkage
  modified_base 7: mod_base = OTHER; note = Nucleotide with phosphorothioate linkage
  modified_base 8: mod_base = OTHER; note = Nucleotide with phosphorothioate linkage
  modified_base 9: mod_base = OTHER; note = Nucleotide with phosphorothioate linkage
  modified_base 10: mod_base = OTHER; note = Nucleotide with phosphorothioate linkage
  modified_base 11: mod_base = OTHER; note = Nucleotide with phosphorothioate linkage
  modified_base 12: mod_base = OTHER; note = Nucleotide with phosphorothioate linkage
  modified_base 13: mod_base = OTHER; note = Nucleotide with phosphorothioate linkage
  modified_base 14: mod_base = OTHER; note = Nucleotide with phosphorothioate linkage
  modified_base 15: mod_base = OTHER; note = 5-methyl beta-D-oxy locked nucleotide with phosphorothioate linkage
  modified_base 16: mod_base = OTHER; note = beta-D-oxy locked nucleotide with phosphorothioate linkage
ccacccatagacaact

SEQ ID NO: 336 - DNA, 17 bp, synthetic construct
  source 1..17: mol_type = other DNA
  modified_base 1: mod_base = OTHER; note = beta-D-oxy locked nucleotide with phosphorothioate linkage
  modified_base 2: mod_base = OTHER; note = 5-methyl beta-D-oxy locked nucleotide with phosphorothioate linkage
  modified_base 3: mod_base = OTHER; note = Nucleotide with phosphorothioate linkage
  modified_base 4: mod_base = OTHER; note = Nucleotide with phosphorothioate linkage
  modified_base 5: mod_base = OTHER; note = Nucleotide with phosphorothioate linkage
  modified_base 6: mod_base = OTHER; note = Nucleotide with phosphorothioate linkage
  modified_base 7: mod_base = OTHER; note = Nucleotide with phosphorothioate linkage
  modified_base 8: mod_base = OTHER; note = Nucleotide with phosphorothioate linkage
  modified_base 9: mod_base = OTHER; note = Nucleotide with phosphorothioate linkage
  modified_base 10: mod_base = OTHER; note = Nucleotide with phosphorothioate linkage
  modified_base 11: mod_base = OTHER; note = Nucleotide with phosphorothioate linkage
  modified_base 12: mod_base = OTHER; note = Nucleotide with phosphorothioate linkage
  modified_base 13: mod_base = OTHER; note = Nucleotide with phosphorothioate linkage
  modified_base 14: mod_base = OTHER; note = Nucleotide with phosphorothioate linkage
  modified_base 15: mod_base = OTHER; note = beta-D-oxy locked nucleotide with phosphorothioate linkage
  modified_base 16: mod_base = OTHER; note = beta-D-oxy locked nucleotide with phosphorothioate linkage
  modified_base 17: mod_base = OTHER; note = 5-methyl beta-D-oxy locked nucleotide with phosphorothioate linkage
acccacccatagacaac

SEQ ID NO: 337 - DNA, 15 bp, synthetic construct
  source 1..15: mol_type = other DNA
  modified_base 1: mod_base = OTHER; note = beta-D-oxy locked nucleotide with phosphorothioate linkage
  modified_base 2: mod_base = OTHER; note = beta-D-oxy locked nucleotide with phosphorothioate linkage
  modified_base 3: mod_base = OTHER; note = Nucleotide with phosphorothioate linkage
  modified_base 4: mod_base = OTHER; note = Nucleotide with phosphorothioate linkage
  modified_base 5: mod_base = OTHER; note = Nucleotide with phosphorothioate linkage
  modified_base 6: mod_base = OTHER; note = Nucleotide with phosphorothioate linkage
  modified_base 7: mod_base = OTHER; note = Nucleotide with phosphorothioate linkage
  modified_base 8: mod_base = OTHER; note = Nucleotide with phosphorothioate linkage
  modified_base 9: mod_base = OTHER; note = Nucleotide with phosphorothioate linkage
  modified_base 10: mod_base = OTHER; note = Nucleotide with phosphorothioate linkage
  modified_base 11: mod_base = OTHER; note = Nucleotide with phosphorothioate linkage
  modified_base 12: mod_base = OTHER; note = Nucleotide with phosphorothioate linkage
  modified_base 13: mod_base = OTHER; note = Nucleotide with phosphorothioate linkage
  modified_base 14: mod_base = OTHER; note = 5-methyl beta-D-oxy locked nucleotide with phosphorothioate linkage
  modified_base 15: mod_base = OTHER; note = beta-D-oxy locked nucleotide with phosphorothioate linkage
agctacccaccgaca

SEQ ID NO: 338 - DNA, 19 bp, synthetic construct
  source 1..19: mol_type = other DNA
  modified_base 1: mod_base = OTHER; note = 5-methyl beta-D-oxy locked nucleotide with phosphorothioate linkage
  modified_base 2: mod_base = OTHER; note = beta-D-oxy locked nucleotide with phosphorothioate linkage
  modified_base 3: mod_base = OTHER; note = Nucleotide with phosphorothioate linkage
  modified_base 4: mod_base = OTHER; note = Nucleotide with phosphorothioate linkage
  modified_base 5: mod_base = OTHER; note = Nucleotide with phosphorothioate linkage
  modified_base 6: mod_base = OTHER; note = Nucleotide with phosphorothioate linkage
  modified_base 7: mod_base = OTHER; note = Nucleotide with phosphorothioate linkage
  modified_base 8: mod_base = OTHER; note = Nucleotide with phosphorothioate linkage
  modified_base 9: mod_base = OTHER; note = Nucleotide with phosphorothioate linkage
  modified_base 10: mod_base = OTHER; note = Nucleotide with phosphorothioate linkage
  modified_base 11: mod_base = OTHER; note = Nucleotide with phosphorothioate linkage
  modified_base 12: mod_base = OTHER; note = Nucleotide with phosphorothioate linkage
  modified_base 13: mod_base = OTHER; note = Nucleotide with phosphorothioate linkage
  modified_base 14: mod_base = OTHER; note = Nucleotide with phosphorothioate linkage
  modified_base 15: mod_base = OTHER; note = Nucleotide with phosphorothioate linkage
  modified_base 16: mod_base = OTHER; note = 5-methyl beta-D-oxy locked nucleotide with phosphorothioate linkage
  modified_base 17: mod_base = OTHER; note = beta-D-oxy locked nucleotide with phosphorothioate linkage
  modified_base 18: mod_base = OTHER; note = beta-D-oxy locked nucleotide with phosphorothioate linkage
  modified_base 19: mod_base = OTHER; note = beta-D-oxy locked nucleotide with phosphorothioate linkage
catacttcttcacttcaaa

SEQ ID NO: 339 - DNA, 21 bp, synthetic construct
  source 1..21: mol_type = other DNA
  modified_base 1: mod_base = OTHER; note = beta-D-oxy locked nucleotide with phosphorothioate linkage
  modified_base 2: mod_base = OTHER; note = 5-methyl beta-D-oxy locked nucleotide with phosphorothioate linkage
  modified_base 3: mod_base = OTHER; note = Nucleotide with phosphorothioate linkage
  modified_base 4: mod_base = OTHER; note = Nucleotide with phosphorothioate linkage
  modified_base 5: mod_base = OTHER; note = Nucleotide with phosphorothioate linkage
  modified_base 6: mod_base = OTHER; note = Nucleotide with phosphorothioate linkage
  modified_base 7: mod_base = OTHER; note = Nucleotide with phosphorothioate linkage
  modified_base 8: mod_base = OTHER; note = Nucleotide with phosphorothioate linkage
  modified_base 9: mod_base = OTHER; note = Nucleotide with phosphorothioate linkage
  modified_base 10: mod_base = OTHER; note = Nucleotide with phosphorothioate linkage
  modified_base 11: mod_base = OTHER; note = Nucleotide with phosphorothioate linkage
  modified_base 12: mod_base = OTHER; note = Nucleotide with phosphorothioate linkage
  modified_base 13: mod_base = OTHER; note = Nucleotide with phosphorothioate linkage
  modified_base 14: mod_base = OTHER; note = Nucleotide with phosphorothioate linkage
  modified_base 15: mod_base = OTHER; note = Nucleotide with phosphorothioate linkage
  modified_base 16: mod_base = OTHER; note = Nucleotide with phosphorothioate linkage
  modified_base 17: mod_base = OTHER; note = Nucleotide with phosphorothioate linkage
  modified_base 18: mod_base = OTHER; note = 5-methyl beta-D-oxy locked nucleotide with phosphorothioate linkage
  modified_base 19: mod_base = OTHER; note = beta-D-oxy locked nucleotide with phosphorothioate linkage
  modified_base 20: mod_base = OTHER; note = beta-D-oxy locked nucleotide with phosphorothioate linkage
  modified_base 21: mod_base = OTHER; note = beta-D-oxy locked nucleotide with phosphorothioate linkage
accatacttcttcacttcaaa

SEQ ID NO: 340 - DNA, 18 bp, synthetic construct
  source 1..18: mol_type = other DNA
  modified_base 1: mod_base = OTHER; note = beta-D-oxy locked nucleotide with phosphorothioate linkage
  modified_base 2: mod_base = OTHER; note = beta-D-oxy locked nucleotide with phosphorothioate linkage
  modified_base 3: mod_base = OTHER; note = beta-D-oxy locked nucleotide with phosphorothioate linkage
  modified_base 4: mod_base = OTHER; note = Nucleotide with phosphorothioate linkage
  modified_base 5: mod_base = OTHER; note = Nucleotide with phosphorothioate linkage
  modified_base 6: mod_base = OTHER; note = Nucleotide with phosphorothioate linkage
  modified_base 7: mod_base = OTHER; note = Nucleotide with phosphorothioate linkage
  modified_base 8: mod_base = OTHER; note = Nucleotide with phosphorothioate linkage
  modified_base 9: mod_base = OTHER; note = Nucleotide with phosphorothioate linkage
  modified_base 10: mod_base = OTHER; note = Nucleotide with phosphorothioate linkage
  modified_base 11: mod_base = OTHER; note = Nucleotide with phosphorothioate linkage
  modified_base 12: mod_base = OTHER; note = Nucleotide with phosphorothioate linkage
  modified_base 13: mod_base = OTHER; note = Nucleotide with phosphorothioate linkage
  modified_base 14: mod_base = OTHER; note = Nucleotide with phosphorothioate linkage
  modified_base 15: mod_base = OTHER; note = 5-methyl beta-D-oxy locked nucleotide with phosphorothioate linkage
  modified_base 16: mod_base = OTHER; note = beta-D-oxy locked nucleotide with phosphorothioate linkage
  modified_base 17: mod_base = OTHER; note = beta-D-oxy locked nucleotide with phosphorothioate linkage
  modified_base 18: mod_base = OTHER; note = beta-D-oxy locked nucleotide with phosphorothioate linkage
atacttcttcacttcaaa

SEQ ID NO: 341 - DNA, 21 bp, synthetic construct
  source 1..21: mol_type = other DNA
  modified_base 1: mod_base = OTHER; note = 5-methyl beta-D-oxy locked nucleotide with phosphorothioate linkage
  modified_base 2: mod_base = OTHER; note = beta-D-oxy locked nucleotide with phosphorothioate linkage
  modified_base 3: mod_base = OTHER; note = Nucleotide with phosphorothioate linkage
  modified_base 4: mod_base = OTHER; note = Nucleotide with phosphorothioate linkage
  modified_base 5: mod_base = OTHER; note = Nucleotide with phosphorothioate linkage
  modified_base 6: mod_base = OTHER; note = Nucleotide with phosphorothioate linkage
  modified_base 7: mod_base = OTHER; note = Nucleotide with phosphorothioate linkage
  modified_base 8: mod_base = OTHER; note = Nucleotide with phosphorothioate linkage
  modified_base 9: mod_base = OTHER; note = Nucleotide with phosphorothioate linkage
  modified_base 10: mod_base = OTHER; note = Nucleotide with phosphorothioate linkage
  modified_base 11: mod_base = OTHER; note = Nucleotide with phosphorothioate linkage
  modified_base 12: mod_base = OTHER; note = Nucleotide with phosphorothioate linkage
  modified_base 13: mod_base = OTHER; note = Nucleotide with phosphorothioate linkage
  modified_base 14: mod_base = OTHER; note = Nucleotide with phosphorothioate linkage
  modified_base 15: mod_base = OTHER; note = Nucleotide with phosphorothioate linkage
  modified_base 16: mod_base = OTHER; note = Nucleotide with phosphorothioate linkage
  modified_base 17: mod_base = OTHER; note = Nucleotide with phosphorothioate linkage
  modified_base 18: mod_base = OTHER; note = Nucleotide with phosphorothioate linkage
  modified_base 19: mod_base = OTHER; note = Nucleotide with phosphorothioate linkage
  modified_base 20: mod_base = OTHER; note = beta-D-oxy locked nucleotide with phosphorothioate linkage
  modified_base 21: mod_base = OTHER; note = beta-D-oxy locked nucleotide with phosphorothioate linkage
caccatacttcttcacttcaa

SEQ ID NO: 342 - DNA, 18 bp, synthetic construct
  source 1..18: mol_type = other DNA
  modified_base 1: mod_base = OTHER; note = 5-methyl beta-D-oxy locked nucleotide with phosphorothioate linkage
  modified_base 2: mod_base = OTHER; note = beta-D-oxy locked nucleotide with phosphorothioate linkage
  modified_base 3: mod_base = OTHER; note = beta-D-oxy locked nucleotide with phosphorothioate linkage
  modified_base 4: mod_base = OTHER; note = beta-D-oxy locked nucleotide with phosphorothioate linkage
  modified_base 5: mod_base = OTHER; note = Nucleotide with phosphorothioate linkage
  modified_base 6: mod_base = OTHER; note = Nucleotide with phosphorothioate linkage
  modified_base 7: mod_base = OTHER; note = Nucleotide with phosphorothioate linkage
  modified_base 8: mod_base = OTHER; note = Nucleotide with phosphorothioate linkage
  modified_base 9: mod_base = OTHER; note = Nucleotide with phosphorothioate linkage
  modified_base 10: mod_base = OTHER; note = Nucleotide with phosphorothioate linkage
  modified_base 11: mod_base = OTHER; note = Nucleotide with phosphorothioate linkage
  modified_base 12: mod_base = OTHER; note = Nucleotide with phosphorothioate linkage
  modified_base 13: mod_base = OTHER; note = Nucleotide with phosphorothioate linkage
  modified_base 14: mod_base = OTHER; note = Nucleotide with phosphorothioate linkage
  modified_base 15: mod_base = OTHER; note = Nucleotide with phosphorothioate linkage
  modified_base 16: mod_base = OTHER; note = 5-methyl beta-D-oxy locked nucleotide with phosphorothioate linkage
  modified_base 17: mod_base = OTHER; note = beta-D-oxy locked nucleotide with phosphorothioate linkage
  modified_base 18: mod_base = OTHER; note = beta-D-oxy locked nucleotide with phosphorothioate linkage
catacttcttcacttcaa

SEQ ID NO: 343 - DNA, 20 bp, synthetic construct
  source 1..20: mol_type = other DNA
  modified_base 1: mod_base = OTHER; note = beta-D-oxy locked nucleotide with phosphorothioate linkage
  modified_base 2: mod_base = OTHER; note = 5-methyl beta-D-oxy locked nucleotide with phosphorothioate linkage
  modified_base 3: mod_base = OTHER; note = Nucleotide with phosphorothioate linkage
  modified_base 4: mod_base = OTHER; note = Nucleotide with phosphorothioate linkage
  modified_base 5: mod_base = OTHER; note = Nucleotide with phosphorothioate linkage
  modified_base 6: mod_base = OTHER; note = Nucleotide with phosphorothioate linkage
  modified_base 7: mod_base = OTHER; note = Nucleotide with phosphorothioate linkage
  modified_base 8: mod_base = OTHER; note = Nucleotide with phosphorothioate linkage
  modified_base 9: mod_base = OTHER; note = Nucleotide with phosphorothioate linkage
  modified_base 10: mod_base = OTHER; note = Nucleotide with phosphorothioate linkage
  modified_base 11: mod_base = OTHER; note = Nucleotide with phosphorothioate linkage
  modified_base 12: mod_base = OTHER; note = Nucleotide with phosphorothioate linkage
  modified_base 13: mod_base = OTHER; note = Nucleotide with phosphorothioate linkage
  modified_base 14: mod_base = OTHER; note = Nucleotide with phosphorothioate linkage
  modified_base 15: mod_base = OTHER; note = Nucleotide with phosphorothioate linkage
  modified_base 16: mod_base = OTHER; note = Nucleotide with phosphorothioate linkage
  modified_base 17: mod_base = OTHER; note = Nucleotide with phosphorothioate linkage
  modified_base 18: mod_base = OTHER; note = Nucleotide with phosphorothioate linkage
  modified_base 19: mod_base = OTHER; note = beta-D-oxy locked nucleotide with phosphorothioate linkage
  modified_base 20: mod_base = OTHER; note = beta-D-oxy locked nucleotide with phosphorothioate linkage
accatacttcttcacttcaa

SEQ ID NO: 344 - DNA, 19 bp, synthetic construct
  source 1..19: mol_type = other DNA
  modified_base 1: mod_base = OTHER; note = 5-methyl beta-D-oxy locked nucleotide with phosphorothioate linkage
  modified_base 2: mod_base = OTHER; note = 5-methyl beta-D-oxy locked nucleotide with phosphorothioate linkage
  modified_base 3: mod_base = OTHER; note = Nucleotide with phosphorothioate linkage
  modified_base 4: mod_base = OTHER; note = Nucleotide with phosphorothioate linkage
  modified_base 5: mod_base = OTHER; note = Nucleotide with phosphorothioate linkage
  modified_base 6: mod_base = OTHER; note = Nucleotide with phosphorothioate linkage
  modified_base 7: mod_base = OTHER; note = Nucleotide with phosphorothioate linkage
  modified_base 8: mod_base = OTHER; note = Nucleotide with phosphorothioate linkage
  modified_base 9: mod_base = OTHER; note = Nucleotide with phosphorothioate linkage
  modified_base 10: mod_base = OTHER; note = Nucleotide with phosphorothioate linkage
  modified_base 11: mod_base = OTHER; note = Nucleotide with phosphorothioate linkage
  modified_base 12: mod_base = OTHER; note = Nucleotide with phosphorothioate linkage
  modified_base 13: mod_base = OTHER; note = Nucleotide with phosphorothioate linkage
  modified_base 14: mod_base = OTHER; note = Nucleotide with phosphorothioate linkage
  modified_base 15: mod_base = OTHER; note = Nucleotide with phosphorothioate linkage
  modified_base 16: mod_base = OTHER; note = Nucleotide with phosphorothioate linkage
  modified_base 17: mod_base = OTHER; note = Nucleotide with phosphorothioate linkage
  modified_base 18: mod_base = OTHER; note = beta-D-oxy locked nucleotide with phosphorothioate linkage
  modified_base 19: mod_base = OTHER; note = beta-D-oxy locked nucleotide with phosphorothioate linkage
ccatacttcttcacttcaa

SEQ ID NO: 345 - DNA, 19 bp, synthetic construct
  source 1..19: mol_type = other DNA
  modified_base 1: mod_base = OTHER; note = beta-D-oxy locked nucleotide with phosphorothioate linkage
  modified_base 2: mod_base = OTHER; note = 5-methyl beta-D-oxy locked nucleotide with phosphorothioate linkage
  modified_base 3: mod_base = OTHER; note = Nucleotide with phosphorothioate linkage
  modified_base 4: mod_base = OTHER; note = Nucleotide with phosphorothioate linkage
  modified_base 5: mod_base = OTHER; note = Nucleotide with phosphorothioate linkage
  modified_base 6: mod_base = OTHER; note = Nucleotide with phosphorothioate linkage
  modified_base 7: mod_base = OTHER; note = Nucleotide with phosphorothioate linkage
  modified_base 8: mod_base = OTHER; note = Nucleotide with phosphorothioate linkage
  modified_base 9: mod_base = OTHER; note = Nucleotide with phosphorothioate linkage
  modified_base 10: mod_base = OTHER; note = Nucleotide with phosphorothioate linkage
  modified_base 11: mod_base = OTHER; note = Nucleotide with phosphorothioate linkage
  modified_base 12: mod_base = OTHER; note = Nucleotide with phosphorothioate linkage
  modified_base 13: mod_base = OTHER; note = Nucleotide with phosphorothioate linkage
  modified_base 14: mod_base = OTHER; note = Nucleotide with phosphorothioate linkage
  modified_base 15: mod_base = OTHER; note = Nucleotide with phosphorothioate linkage
  modified_base 16: mod_base = OTHER; note = Nucleotide with phosphorothioate linkage
  modified_base 17: mod_base = OTHER; note = Nucleotide with phosphorothioate linkage
  modified_base 18: mod_base = OTHER; note = 5-methyl beta-D-oxy locked nucleotide with phosphorothioate linkage
  modified_base 19: mod_base = OTHER; note = beta-D-oxy locked nucleotide with phosphorothioate linkage
accatacttcttcacttca

SEQ ID NO: 346 - DNA, 17 bp, synthetic construct
  source 1..17: mol_type = other DNA
  modified_base 1: mod_base = OTHER; note = 5-methyl beta-D-oxy locked nucleotide with phosphorothioate linkage
  modified_base 2: mod_base = OTHER; note = beta-D-oxy locked nucleotide with phosphorothioate linkage
  modified_base 3: mod_base = OTHER; note = beta-D-oxy locked nucleotide with phosphorothioate linkage
  modified_base 4: mod_base = OTHER; note = Nucleotide with phosphorothioate linkage
  modified_base 5: mod_base = OTHER; note = Nucleotide with phosphorothioate linkage
  modified_base 6: mod_base = OTHER; note = Nucleotide with phosphorothioate linkage
  modified_base 7: mod_base = OTHER; note = Nucleotide with phosphorothioate linkage
  modified_base 8: mod_base = OTHER; note = Nucleotide with phosphorothioate linkage
  modified_base 9: mod_base = OTHER; note = Nucleotide with phosphorothioate linkage
  modified_base 10: mod_base = OTHER; note = Nucleotide with phosphorothioate linkage
  modified_base 11: mod_base = OTHER; note = Nucleotide with phosphorothioate linkage
  modified_base 12: mod_base = OTHER; note = Nucleotide with phosphorothioate linkage
  modified_base 13: mod_base = OTHER; note = Nucleotide with phosphorothioate linkage
  modified_base 14: mod_base = OTHER; note = Nucleotide with phosphorothioate linkage
  modified_base 15: mod_base = OTHER; note = Nucleotide with phosphorothioate linkage
  modified_base 16: mod_base = OTHER; note = 5-methyl beta-D-oxy locked nucleotide with phosphorothioate linkage
  modified_base 17: mod_base = OTHER; note = beta-D-oxy locked nucleotide with phosphorothioate linkage
catacttcttcacttca

SEQ ID NO: 347 - DNA, 18 bp, synthetic construct
  source 1..18: mol_type = other DNA
  modified_base 1: mod_base = OTHER; note = 5-methyl beta-D-oxy locked nucleotide with phosphorothioate linkage
  modified_base 2: mod_base = OTHER; note = 5-methyl beta-D-oxy locked nucleotide with phosphorothioate linkage
  modified_base 3: mod_base = OTHER; note = Nucleotide with phosphorothioate linkage
  modified_base 4: mod_base = OTHER; note = Nucleotide with phosphorothioate linkage
  modified_base 5: mod_base = OTHER; note = Nucleotide with phosphorothioate linkage
  modified_base 6: mod_base = OTHER; note = Nucleotide with phosphorothioate linkage
  modified_base 7: mod_base = OTHER; note = Nucleotide with phosphorothioate linkage
  modified_base 8: mod_base = OTHER; note = Nucleotide with phosphorothioate linkage
  modified_base 9: mod_base = OTHER; note = Nucleotide with phosphorothioate linkage
  modified_base 10: mod_base = OTHER; note = Nucleotide with phosphorothioate linkage
  modified_base 11: mod_base = OTHER; note = Nucleotide with phosphorothioate linkage
  modified_base 12: mod_base = OTHER; note = Nucleotide with phosphorothioate linkage
  modified_base 13: mod_base = OTHER; note = Nucleotide with phosphorothioate linkage
  modified_base 14: mod_base = OTHER; note = Nucleotide with phosphorothioate linkage
  modified_base 15: mod_base = OTHER; note = Nucleotide with phosphorothioate linkage
  modified_base 16: mod_base = OTHER; note = Nucleotide with phosphorothioate linkage
  modified_base 17: mod_base = OTHER; note = 5-methyl beta-D-oxy locked nucleotide with phosphorothioate linkage
  modified_base 18: mod_base = OTHER; note = beta-D-oxy locked nucleotide with phosphorothioate linkage
ccatacttcttcacttca

SEQ ID NO: 348 - DNA, 18 bp, synthetic construct
  source 1..18: mol_type = other DNA
  modified_base 1: mod_base = OTHER; note = beta-D-oxy locked nucleotide with phosphorothioate linkage
  modified_base 2: mod_base = OTHER; note = 5-methyl beta-D-oxy locked nucleotide with phosphorothioate linkage
  modified_base 3: mod_base = OTHER; note = 5-methyl beta-D-oxy locked nucleotide with phosphorothioate linkage
  modified_base 4: mod_base = OTHER; note = Nucleotide with phosphorothioate linkage
  modified_base 5: mod_base = OTHER; note = Nucleotide with phosphorothioate linkage
  modified_base 6: mod_base = OTHER; note = Nucleotide with phosphorothioate linkage
  modified_base 7: mod_base = OTHER; note = Nucleotide with phosphorothioate linkage
  modified_base 8: mod_base = OTHER; note = Nucleotide with phosphorothioate linkage
  modified_base 9: mod_base = OTHER; note = Nucleotide with phosphorothioate linkage
  modified_base 10: mod_base = OTHER; note = Nucleotide with phosphorothioate linkage
  modified_base 11: mod_base = OTHER; note = Nucleotide with phosphorothioate linkage
  modified_base 12: mod_base = OTHER; note = Nucleotide with phosphorothioate linkage
  modified_base 13: mod_base = OTHER; note = Nucleotide with phosphorothioate linkage
  modified_base 14: mod_base = OTHER; note = Nucleotide with phosphorothioate linkage
  modified_base 15: mod_base = OTHER; note = Nucleotide with phosphorothioate linkage
  modified_base 16: mod_base = OTHER; note = Nucleotide with phosphorothioate linkage
  modified_base 17: mod_base = OTHER; note = beta-D-oxy locked nucleotide with phosphorothioate linkage
  modified_base 18: mod_base = OTHER; note = 5-methyl beta-D-oxy locked nucleotide with phosphorothioate linkage
accatacttcttcacttc

SEQ ID NO: 349 - DNA, 19 bp, synthetic construct
  source 1..19: mol_type = other DNA
  modified_base 1: mod_base = OTHER; note = 5-methyl beta-D-oxy locked nucleotide with phosphorothioate linkage
  modified_base 2: mod_base = OTHER; note = beta-D-oxy locked nucleotide with phosphorothioate linkage
  modified_base 3: mod_base = OTHER; note = Nucleotide with phosphorothioate linkage
  modified_base 4: mod_base = OTHER; note = Nucleotide with phosphorothioate linkage
  modified_base 5: mod_base = OTHER; note = Nucleotide with phosphorothioate linkage
  modified_base 6: mod_base = OTHER; note = Nucleotide with phosphorothioate linkage
  modified_base 7: mod_base = OTHER; note = Nucleotide with phosphorothioate linkage
  modified_base 8: mod_base = OTHER; note = Nucleotide with phosphorothioate linkage
  modified_base 9: mod_base = OTHER; note = Nucleotide with phosphorothioate linkage
  modified_base 10: mod_base = OTHER; note = Nucleotide with phosphorothioate linkage
  modified_base 11: mod_base = OTHER; note = Nucleotide with phosphorothioate linkage
  modified_base 12: mod_base = OTHER; note = Nucleotide with phosphorothioate linkage
  modified_base 13: mod_base = OTHER; note = Nucleotide with phosphorothioate linkage
  modified_base 14: mod_base = OTHER; note = Nucleotide with phosphorothioate linkage
  modified_base 15: mod_base = OTHER; note = Nucleotide with phosphorothioate linkage
  modified_base 16: mod_base = OTHER; note = Nucleotide with phosphorothioate linkage
  modified_base 17: mod_base = OTHER; note = Nucleotide with phosphorothioate linkage
  modified_base 18: mod_base = OTHER; note = beta-D-oxy locked nucleotide with phosphorothioate linkage
  modified_base 19: mod_base = OTHER; note = 5-methyl beta-D-oxy locked nucleotide with phosphorothioate linkage
caccatacttcttcacttc

SEQ ID NO: 350 - DNA, 17 bp, synthetic construct
  source 1..17: mol_type = other DNA
  modified_base 1: mod_base = OTHER; note = beta-D-oxy locked nucleotide with phosphorothioate linkage
  modified_base 2: mod_base = OTHER; note = 5-methyl beta-D-oxy locked nucleotide with phosphorothioate linkage
  modified_base 3: mod_base = OTHER; note = 5-methyl beta-D-oxy locked nucleotide with phosphorothioate linkage
  modified_base 4: mod_base = OTHER; note = beta-D-oxy locked nucleotide with phosphorothioate linkage
  modified_base 5: mod_base = OTHER; note = Nucleotide with phosphorothioate linkage
  modified_base 6: mod_base = OTHER; note = Nucleotide with phosphorothioate linkage
  modified_base 7: mod_base = OTHER; note = Nucleotide with phosphorothioate linkage
  modified_base 8: mod_base = OTHER; note = Nucleotide with phosphorothioate linkage
  modified_base 9: mod_base = OTHER; note = Nucleotide with phosphorothioate linkage
  modified_base 10: mod_base = OTHER; note = Nucleotide with phosphorothioate linkage
  modified_base 11: mod_base = OTHER; note = Nucleotide with phosphorothioate linkage
  modified_base 12: mod_base = OTHER; note = Nucleotide with phosphorothioate linkage
  modified_base 13: mod_base = OTHER; note = Nucleotide with phosphorothioate linkage
  modified_base 14: mod_base = OTHER; note = Nucleotide with phosphorothioate linkage
  modified_base 15: mod_base = OTHER; note = Nucleotide with phosphorothioate linkage
  modified_base 16: mod_base = OTHER; note = beta-D-oxy locked nucleotide with phosphorothioate linkage
  modified_base 17: mod_base = OTHER; note = beta-D-oxy locked nucleotide with phosphorothioate linkage
accatacttcttcactt

SEQ ID NO: 351 - DNA, 19 bp, synthetic construct
  source 1..19: mol_type = other DNA
  modified_base 1: mod_base = OTHER; note = beta-D-oxy locked nucleotide with phosphorothioate linkage
  modified_base 2: mod_base = OTHER; note = 5-methyl beta-D-oxy locked nucleotide with phosphorothioate linkage
  modified_base 3: mod_base = OTHER; note = beta-D-oxy locked nucleotide with phosphorothioate linkage
  modified_base 4: mod_base = OTHER; note = Nucleotide with phosphorothioate linkage
  modified_base 5: mod_base = OTHER; note = Nucleotide with phosphorothioate linkage
  modified_base 6: mod_base = OTHER; note = Nucleotide with phosphorothioate linkage
  modified_base 7: mod_base = OTHER; note = Nucleotide with phosphorothioate linkage
  modified_base 8: mod_base = OTHER; note = Nucleotide with phosphorothioate linkage
  modified_base 9: mod_base = OTHER; note = Nucleotide with phosphorothioate linkage
  modified_base 10: mod_base = OTHER; note = Nucleotide with phosphorothioate linkage
  modified_base 11: mod_base = OTHER; note = Nucleotide with phosphorothioate linkage
  modified_base 12: mod_base = OTHER; note = Nucleotide with phosphorothioate linkage
  modified_base 13: mod_base = OTHER; note = Nucleotide with phosphorothioate linkage
  modified_base 14: mod_base = OTHER; note = Nucleotide with phosphorothioate linkage
  modified_base 15: mod_base = OTHER; note = Nucleotide with phosphorothioate linkage
  modified_base 16: mod_base = OTHER; note = Nucleotide with phosphorothioate linkage
  modified_base 17: mod_base = OTHER; note = Nucleotide with phosphorothioate linkage
  modified_base 18: mod_base = OTHER; note = beta-D-oxy locked nucleotide with phosphorothioate linkage
  modified_base 19: mod_base = OTHER; note = beta-D-oxy locked nucleotide with phosphorothioate linkage
tcaccatacttcttcactt

SEQ ID NO: 352 - DNA, 18 bp, synthetic construct
  source 1..18: mol_type = other DNA
  modified_base 1: mod_base = OTHER; note = 5-methyl beta-D-oxy locked nucleotide with phosphorothioate linkage
  modified_base 2: mod_base = OTHER; note = beta-D-oxy locked nucleotide with phosphorothioate linkage
  modified_base 3: mod_base = OTHER; note = Nucleotide with phosphorothioate linkage
  modified_base 4: mod_base = OTHER; note = Nucleotide with phosphorothioate linkage
  modified_base 5: mod_base = OTHER; note = Nucleotide with phosphorothioate linkage
  modified_base 6: mod_base = OTHER; note = Nucleotide with phosphorothioate linkage
  modified_base 7: mod_base = OTHER; note = Nucleotide with phosphorothioate linkage
  modified_base 8: mod_base = OTHER; note = Nucleotide with phosphorothioate linkage
  modified_base 9: mod_base = OTHER; note = Nucleotide with phosphorothioate linkage
  modified_base 10: mod_base = OTHER; note = Nucleotide with phosphorothioate linkage
  modified_base 11: mod_base = OTHER; note = Nucleotide with phosphorothioate linkage
  modified_base 12: mod_base = OTHER; note = Nucleotide with phosphorothioate linkage
  modified_base 13: mod_base = OTHER; note = Nucleotide with phosphorothioate linkage
  modified_base 14: mod_base = OTHER; note = Nucleotide with phosphorothioate linkage
  modified_base 15: mod_base = OTHER; note = Nucleotide with phosphorothioate linkage
  modified_base 16: mod_base = OTHER; note = Nucleotide with phosphorothioate linkage
  modified_base 17: mod_base = OTHER; note = beta-D-oxy locked nucleotide with phosphorothioate linkage
  modified_base 18: mod_base = OTHER; note = beta-D-oxy locked nucleotide with phosphorothioate linkage
caccatacttcttcactt

SEQ ID NO: 353 - DNA, 17 bp, synthetic construct
  source 1..17: mol_type = other DNA
  modified_base 1: mod_base = OTHER; note = 5-methyl beta-D-oxy locked nucleotide with phosphorothioate linkage
  modified_base 2: mod_base = OTHER; note = beta-D-oxy locked nucleotide with phosphorothioate linkage
  modified_base 3: mod_base = OTHER; note = Nucleotide with phosphorothioate linkage
  modified_base 4: mod_base = OTHER; note = Nucleotide with phosphorothioate linkage
  modified_base 5: mod_base = OTHER; note = Nucleotide with phosphorothioate linkage
  modified_base 6: mod_base = OTHER; note = Nucleotide with phosphorothioate linkage
  modified_base 7: mod_base = OTHER; note = Nucleotide with phosphorothioate linkage
  modified_base 8: mod_base = OTHER; note = Nucleotide with phosphorothioate linkage
  modified_base 9: mod_base = OTHER; note = Nucleotide with phosphorothioate linkage
  modified_base 10: mod_base = OTHER; note = Nucleotide with phosphorothioate linkage
  modified_base 11: mod_base = OTHER; note = Nucleotide with phosphorothioate linkage
  modified_base 12: mod_base = OTHER; note = Nucleotide with phosphorothioate linkage
  modified_base 13: mod_base = OTHER; note = Nucleotide with phosphorothioate linkage
  modified_base 14: mod_base = OTHER; note = Nucleotide with phosphorothioate linkage
  modified_base 15: mod_base = OTHER; note = Nucleotide with phosphorothioate linkage
  modified_base 16: mod_base = OTHER; note = 5-methyl beta-D-oxy locked nucleotide with phosphorothioate linkage
  modified_base 17: mod_base = OTHER; note = beta-D-oxy locked nucleotide with phosphorothioate linkage
caccatacttcttcact

SEQ ID NO: 354 - DNA, 18 bp, synthetic construct
  source 1..18: mol_type = other DNA
  modified_base 1: mod_base = OTHER; note = beta-D-oxy locked nucleotide with phosphorothioate linkage
  modified_base 2: mod_base = OTHER; note = 5-methyl beta-D-oxy locked nucleotide with phosphorothioate linkage
  modified_base 3: mod_base = OTHER; note = beta-D-oxy locked nucleotide with phosphorothioate linkage
  modified_base 4: mod_base = OTHER; note = Nucleotide with phosphorothioate linkage
  modified_base 5: mod_base = OTHER; note = Nucleotide with phosphorothioate linkage
  modified_base 6: mod_base = OTHER; note = Nucleotide with phosphorothioate linkage
  modified_base 7: mod_base = OTHER; note = Nucleotide with phosphorothioate linkage
  modified_base 8: mod_base = OTHER; note = Nucleotide with phosphorothioate linkage
  modified_base 9: mod_base = OTHER; note = Nucleotide with phosphorothioate linkage
  modified_base 10: mod_base = OTHER; note = Nucleotide with phosphorothioate linkage
  modified_base 11: mod_base = OTHER; note = Nucleotide with phosphorothioate linkage
  modified_base 12: mod_base = OTHER; note = Nucleotide with phosphorothioate linkage
  modified_base 13: mod_base = OTHER; note = Nucleotide with phosphorothioate linkage
  modified_base 14: mod_base = OTHER; note = Nucleotide with phosphorothioate linkage
  modified_base 15: mod_base = OTHER; note = Nucleotide with phosphorothioate linkage
  modified_base 16: mod_base = OTHER; note = Nucleotide with phosphorothioate linkage
  modified_base 17: mod_base = OTHER; note = 5-methyl beta-D-oxy locked nucleotide with phosphorothioate linkage
  modified_base 18: mod_base = OTHER; note = beta-D-oxy locked nucleotide with phosphorothioate linkage
tcaccatacttcttcact

SEQ ID NO: 355 - DNA, 20 bp, synthetic construct
  source 1..20: mol_type = other DNA
  modified_base 1: mod_base = OTHER; note = 5-methyl beta-D-oxy locked nucleotide with phosphorothioate linkage
  modified_base 2: mod_base = OTHER; note = beta-D-oxy locked nucleotide with phosphorothioate linkage
  modified_base 3: mod_base = OTHER; note = Nucleotide with phosphorothioate linkage
  modified_base 4: mod_base = OTHER; note = Nucleotide with phosphorothioate linkage
  modified_base 5: mod_base = OTHER; note = Nucleotide with phosphorothioate linkage
  modified_base 6: mod_base = OTHER; note = Nucleotide with phosphorothioate linkage
  modified_base 7: mod_base = OTHER; note = Nucleotide with phosphorothioate linkage
  modified_base 8: mod_base = OTHER; note = Nucleotide with phosphorothioate linkage
  modified_base 9: mod_base = OTHER; note = Nucleotide with phosphorothioate linkage
  modified_base 10: mod_base = OTHER; note = Nucleotide with phosphorothioate linkage
  modified_base 11: mod_base = OTHER; note = Nucleotide with phosphorothioate linkage
  modified_base 12: mod_base = OTHER; note = Nucleotide with phosphorothioate linkage
  modified_base 13: mod_base = OTHER; note = Nucleotide with phosphorothioate linkage
  modified_base 14: mod_base = OTHER; note = Nucleotide with phosphorothioate linkage
  modified_base 15: mod_base = OTHER; note = Nucleotide with phosphorothioate linkage
  modified_base 16: mod_base = OTHER; note = Nucleotide with phosphorothioate linkage
  modified_base 17: mod_base = OTHER; note = Nucleotide with phosphorothioate linkage
  modified_base 18: mod_base = OTHER; note = Nucleotide with phosphorothioate linkage
  modified_base 19: mod_base = OTHER; note = beta-D-oxy locked nucleotide with phosphorothioate linkage
  modified_base 20: mod_base = OTHER; note = 5-methyl beta-D-oxy locked nucleotide with phosphorothioate linkage
cactcaccatacttcttcac

SEQ ID NO: 356 - DNA, 17 bp, synthetic construct
  source 1..17: mol_type = other DNA
  modified_base 1: mod_base = OTHER; note = beta-D-oxy locked nucleotide with phosphorothioate linkage
  modified_base 2: mod_base = OTHER; note = 5-methyl beta-D-oxy locked nucleotide with phosphorothioate linkage
  modified_base 3: mod_base = OTHER; note = beta-D-oxy locked nucleotide with phosphorothioate linkage
  modified_base 4: mod_base = OTHER; note = 5-methyl beta-D-oxy locked nucleotide with phosphorothioate linkage
  modified_base 5: mod_base = OTHER; note = Nucleotide with phosphorothioate linkage
  modified_base 6: mod_base = OTHER; note = Nucleotide with phosphorothioate linkage
  modified_base 7: mod_base = OTHER; note = Nucleotide with phosphorothioate linkage
  modified_base 8: mod_base = OTHER; note = Nucleotide with phosphorothioate linkage
  modified_base 9: mod_base = OTHER; note = Nucleotide with phosphorothioate linkage
  modified_base 10: mod_base = OTHER; note = Nucleotide with phosphorothioate linkage
  modified_base 11: mod_base = OTHER; note = Nucleotide with phosphorothioate linkage
  modified_base 12: mod_base = OTHER; note = Nucleotide with phosphorothioate linkage
  modified_base 13: mod_base = OTHER; note = Nucleotide with phosphorothioate linkage
  modified_base 14: mod_base = OTHER; note = Nucleotide with phosphorothioate linkage
  modified_base 15: mod_base = OTHER; note = Nucleotide with phosphorothioate linkage
  modified_base 16: mod_base = OTHER; note = beta-D-oxy locked nucleotide with phosphorothioate linkage
  modified_base 17: mod_base = OTHER; note = 5-methyl beta-D-oxy locked nucleotide with phosphorothioate linkage
tcaccatacttcttcac

SEQ ID NO: 357 - DNA, 18 bp, synthetic construct
  source 1..18: mol_type = other DNA
  modified_base 1: mod_base = OTHER; note = beta-D-oxy locked nucleotide with phosphorothioate linkage
  modified_base 2: mod_base = OTHER; note = 5-methyl beta-D-oxy locked nucleotide with phosphorothioate linkage
  modified_base 3: mod_base = OTHER; note = Nucleotide with phosphorothioate linkage
  modified_base 4: mod_base = OTHER; note = Nucleotide with phosphorothioate linkage
  modified_base 5: mod_base = OTHER; note = Nucleotide with phosphorothioate linkage
  modified_base 6: mod_base = OTHER; note = Nucleotide with phosphorothioate linkage
  modified_base 7: mod_base = OTHER; note = Nucleotide with phosphorothioate linkage
  modified_base 8: mod_base = OTHER; note = Nucleotide with phosphorothioate linkage
  modified_base 9: mod_base = OTHER; note = Nucleotide with phosphorothioate linkage
  modified_base 10: mod_base = OTHER; note = Nucleotide with phosphorothioate linkage
  modified_base 11: mod_base = OTHER; note = Nucleotide with phosphorothioate linkage
  modified_base 12: mod_base = OTHER; note = Nucleotide with phosphorothioate linkage
  modified_base 13: mod_base = OTHER; note = Nucleotide with phosphorothioate linkage
  modified_base 14: mod_base = OTHER; note = Nucleotide with phosphorothioate linkage
  modified_base 15: mod_base = OTHER; note = Nucleotide with phosphorothioate linkage
  modified_base 16: mod_base = OTHER; note = beta-D-oxy locked nucleotide with phosphorothioate linkage
  modified_base 17: mod_base = OTHER; note = 5-methyl beta-D-oxy locked nucleotide with phosphorothioate linkage
  modified_base 18: mod_base = OTHER; note = beta-D-oxy locked nucleotide with phosphorothioate linkage
actcaccatacttcttca

SEQ ID NO: 358 - DNA, 19 bp, synthetic construct
  source 1..19: mol_type = other DNA
  modified_base 1: mod_base = OTHER; note = 5-methyl beta-D-oxy locked nucleotide with phosphorothioate linkage
  modified_base 2: mod_base = OTHER; note = beta-D-oxy locked nucleotide with phosphorothioate linkage
  modified_base 3: mod_base = OTHER; note = Nucleotide with phosphorothioate linkage
  modified_base 4: mod_base = OTHER; note = Nucleotide with phosphorothioate linkage
  modified_base 5: mod_base = OTHER; note = Nucleotide with phosphorothioate linkage
  modified_base 6: mod_base = OTHER; note = Nucleotide with phosphorothioate linkage
  modified_base 7: mod_base = OTHER; note = Nucleotide with phosphorothioate linkage
  modified_base 8: mod_base = OTHER; note = Nucleotide with phosphorothioate linkage
  modified_base 9: mod_base = OTHER; note = Nucleotide with phosphorothioate linkage
  modified_base 10: mod_base = OTHER; note = Nucleotide with phosphorothioate linkage
  modified_base 11: mod_base = OTHER; note = Nucleotide with phosphorothioate linkage
  modified_base 12: mod_base = OTHER; note = Nucleotide with phosphorothioate linkage
  modified_base 13: mod_base = OTHER; note = Nucleotide with phosphorothioate linkage
  modified_base 14: mod_base = OTHER; note = Nucleotide with phosphorothioate linkage
  modified_base 15: mod_base = OTHER; note = Nucleotide with phosphorothioate linkage
  modified_base 16: mod_base = OTHER; note = Nucleotide with phosphorothioate linkage
  modified_base 17: mod_base = OTHER; note = Nucleotide with phosphorothioate linkage
  modified_base 18: mod_base = OTHER; note = 5-methyl beta-D-oxy locked nucleotide with phosphorothioate linkage
  modified_base 19: mod_base = OTHER; note = beta-D-oxy locked nucleotide with phosphorothioate linkage
cactcaccatacttcttca

SEQ ID NO: 359 - DNA, 17 bp, synthetic construct
  source 1..17: mol_type = other DNA
  modified_base 1: mod_base = OTHER; note = 5-methyl beta-D-oxy locked nucleotide with phosphorothioate linkage
  modified_base 2: mod_base = OTHER; note = beta-D-oxy locked nucleotide with phosphorothioate linkage
  modified_base 3: mod_base = OTHER; note = 5-methyl beta-D-oxy locked nucleotide with phosphorothioate linkage
  modified_base 4: mod_base = OTHER; note = Nucleotide with phosphorothioate linkage
  modified_base 5: mod_base = OTHER; note = Nucleotide with phosphorothioate linkage
  modified_base 6: mod_base = OTHER; note = Nucleotide with phosphorothioate linkage
  modified_base 7: mod_base = OTHER; note = Nucleotide with phosphorothioate linkage
  modified_base 8: mod_base = OTHER; note = Nucleotide with phosphorothioate linkage
  modified_base 9: mod_base = OTHER; note = Nucleotide with phosphorothioate linkage
  modified_base 10: mod_base = OTHER; note = Nucleotide with phosphorothioate linkage
  modified_base 11: mod_base = OTHER; note = Nucleotide with phosphorothioate linkage
  modified_base 12: mod_base = OTHER; note = Nucleotide with phosphorothioate linkage
  modified_base 13: mod_base = OTHER; note = Nucleotide with phosphorothioate linkage
  modified_base 14: mod_base = OTHER; note = Nucleotide with phosphorothioate linkage
  modified_base 15: mod_base = OTHER; note = Nucleotide with phosphorothioate linkage
  modified_base 16: mod_base = OTHER; note = 5-methyl beta-D-oxy locked nucleotide with phosphorothioate linkage
  modified_base 17: mod_base = OTHER; note = beta-D-oxy locked nucleotide with phosphorothioate linkage
ctcaccatacttcttca

SEQ ID NO: 360 - DNA, 18 bp, synthetic construct
  source 1..18: mol_type = other DNA
  modified_base 1: mod_base = OTHER; note = 5-methyl beta-D-oxy locked nucleotide with phosphorothioate linkage
  modified_base 2: mod_base = OTHER; note = beta-D-oxy locked nucleotide with phosphorothioate linkage
  modified_base 3: mod_base = OTHER; note = Nucleotide with phosphorothioate linkage
  modified_base 4: mod_base = OTHER; note = Nucleotide with phosphorothioate linkage
  modified_base 5: mod_base = OTHER; note = Nucleotide with phosphorothioate linkage
  modified_base 6: mod_base = OTHER; note = Nucleotide with phosphorothioate linkage
  modified_base 7: mod_base = OTHER; note = Nucleotide with phosphorothioate linkage
  modified_base 8: mod_base = OTHER; note = Nucleotide with phosphorothioate linkage
  modified_base 9: mod_base = OTHER; note = Nucleotide with phosphorothioate linkage
  modified_base 10: mod_base = OTHER; note = Nucleotide with phosphorothioate linkage
  modified_base 11: mod_base = OTHER; note = Nucleotide with phosphorothioate linkage
  modified_base 12: mod_base = OTHER; note = Nucleotide with phosphorothioate linkage
  modified_base 13: mod_base = OTHER; note = Nucleotide with phosphorothioate linkage
  modified_base 14: mod_base = OTHER; note = Nucleotide with phosphorothioate linkage
  modified_base 15: mod_base = OTHER; note = Nucleotide with phosphorothioate linkage
  modified_base 16: mod_base = OTHER; note = Nucleotide with phosphorothioate linkage
  modified_base 17: mod_base = OTHER; note = beta-D-oxy locked nucleotide with phosphorothioate linkage
  modified_base 18: mod_base = OTHER; note = 5-methyl beta-D-oxy locked nucleotide with phosphorothioate linkage
cactcaccatacttcttc

SEQ ID NO: 361 - DNA, 17 bp, synthetic construct
  source 1..17: mol_type = other DNA
  modified_base 1: mod_base = OTHER; note = 5-methyl beta-D-oxy locked nucleotide with phosphorothioate linkage
  modified_base 2: mod_base = OTHER; note = beta-D-oxy locked nucleotide with phosphorothioate linkage
  modified_base 3: mod_base = OTHER; note = Nucleotide with phosphorothioate linkage
  modified_base 4: mod_base = OTHER; note = Nucleotide with phosphorothioate linkage
  modified_base 5: mod_base = OTHER; note = Nucleotide with phosphorothioate linkage
  modified_base 6: mod_base = OTHER; note = Nucleotide with phosphorothioate linkage
  modified_base 7: mod_base = OTHER; note = Nucleotide with phosphorothioate linkage
  modified_base 8: mod_base = OTHER; note = Nucleotide with phosphorothioate linkage
  modified_base 9: mod_base = OTHER; note = Nucleotide with phosphorothioate linkage
  modified_base 10: mod_base = OTHER; note = Nucleotide with phosphorothioate linkage
  modified_base 11: mod_base = OTHER; note = Nucleotide with phosphorothioate linkage
  modified_base 12: mod_base = OTHER; note = Nucleotide with phosphorothioate linkage
  modified_base 13: mod_base = OTHER; note = Nucleotide with phosphorothioate linkage
  modified_base 14: mod_base = OTHER; note = Nucleotide with phosphorothioate linkage
  modified_base 15: mod_base = OTHER; note = Nucleotide with phosphorothioate linkage
  modified_base 16: mod_base = OTHER; note = beta-D-oxy locked nucleotide with phosphorothioate linkage
  modified_base 17: mod_base = OTHER; note = beta-D-oxy locked nucleotide with phosphorothioate linkage
cactcaccatacttctt

SEQ ID NO: 362 - DNA, 17 bp, synthetic construct
  source 1..17: mol_type = other DNA
  modified_base 1: mod_base = OTHER; note = beta-D-oxy locked nucleotide with phosphorothioate linkage
  modified_base 2: mod_base = OTHER; note = 5-methyl beta-D-oxy locked nucleotide with phosphorothioate linkage
  modified_base 3: mod_base = OTHER; note = Nucleotide with phosphorothioate linkage
  modified_base 4: mod_base = OTHER; note = Nucleotide with phosphorothioate linkage
  modified_base 5: mod_base = OTHER; note = Nucleotide with phosphorothioate linkage
  modified_base 6: mod_base = OTHER; note = Nucleotide with phosphorothioate linkage
  modified_base 7: mod_base = OTHER; note = Nucleotide with phosphorothioate linkage
  modified_base 8: mod_base = OTHER; note = Nucleotide with phosphorothioate linkage
  modified_base 9: mod_base = OTHER; note = Nucleotide with phosphorothioate linkage
  modified_base 10: mod_base = OTHER; note = Nucleotide with phosphorothioate linkage
  modified_base 11: mod_base = OTHER; note = Nucleotide with phosphorothioate linkage
  modified_base 12: mod_base = OTHER; note = Nucleotide with phosphorothioate linkage
  modified_base 13: mod_base = OTHER; note = Nucleotide with phosphorothioate linkage
  modified_base 14: mod_base = OTHER; note = Nucleotide with phosphorothioate linkage
  modified_base 15: mod_base = OTHER; note = Nucleotide with phosphorothioate linkage
  modified_base 16: mod_base = OTHER; note = 5-methyl beta-D-oxy locked nucleotide with phosphorothioate linkage
  modified_base 17: mod_base = OTHER; note = beta-D-oxy locked nucleotide with phosphorothioate linkage
gcactcaccatacttct

SEQ ID NO: 363 - DNA, 19 bp, synthetic construct
  source 1..19: mol_type = other DNA
  modified_base 1: mod_base = OTHER; note = beta-D-oxy locked nucleotide with phosphorothioate linkage
  modified_base 2: mod_base = OTHER; note = 5-methyl beta-D-oxy locked nucleotide with phosphorothioate linkage
  modified_base 3: mod_base = OTHER; note = Nucleotide with phosphorothioate linkage
  modified_base 4: mod_base = OTHER; note = Nucleotide with phosphorothioate linkage
  modified_base 5: mod_base = OTHER; note = Nucleotide with phosphorothioate linkage
  modified_base 6: mod_base = OTHER; note = Nucleotide with phosphorothioate linkage
  modified_base 7: mod_base = OTHER; note = Nucleotide with phosphorothioate linkage
  modified_base 8: mod_base = OTHER; note = Nucleotide with phosphorothioate linkage
  modified_base 9: mod_base = OTHER; note = Nucleotide with phosphorothioate linkage
  modified_base 10: mod_base = OTHER; note = Nucleotide with phosphorothioate linkage
  modified_base 11: mod_base = OTHER; note = Nucleotide with phosphorothioate linkage
  modified_base 12: mod_base = OTHER; note = Nucleotide with phosphorothioate linkage
  modified_base 13: mod_base = OTHER; note = Nucleotide with phosphorothioate linkage
  modified_base 14: mod_base = OTHER; note = Nucleotide with phosphorothioate linkage
  modified_base 15: mod_base = OTHER; note = Nucleotide with phosphorothioate linkage
  modified_base 16: mod_base = OTHER; note = Nucleotide with phosphorothioate linkage
  modified_base 17: mod_base = OTHER; note = Nucleotide with phosphorothioate linkage
  modified_base 18: mod_base = OTHER; note = beta-D-oxy locked nucleotide with phosphorothioate linkage
  modified_base 19: mod_base = OTHER; note = 5-methyl beta-D-oxy locked nucleotide with phosphorothioate linkage
tcagcactcaccatacttc

SEQ ID NO: 364 - DNA, 16 bp, synthetic construct
  source 1..16: mol_type = other DNA
  modified_base 1: mod_base = OTHER; note = beta-D-oxy locked nucleotide with phosphorothioate linkage
  modified_base 2: mod_base = OTHER; note = 5-methyl beta-D-oxy locked nucleotide with phosphorothioate linkage
  modified_base 3: mod_base = OTHER; note = Nucleotide with phosphorothioate linkage
  modified_base 4: mod_base = OTHER; note = Nucleotide with phosphorothioate linkage
  modified_base 5: mod_base = OTHER; note = Nucleotide with phosphorothioate linkage
  modified_base 6: mod_base = OTHER; note = Nucleotide with phosphorothioate linkage
  modified_base 7: mod_base = OTHER; note = Nucleotide with phosphorothioate linkage
  modified_base 8: mod_base = OTHER; note = Nucleotide with phosphorothioate linkage
  modified_base 9: mod_base = OTHER; note = Nucleotide with phosphorothioate linkage
  modified_base 10: mod_base = OTHER; note = Nucleotide with phosphorothioate linkage
  modified_base 11: mod_base = OTHER; note = Nucleotide with phosphorothioate linkage
  modified_base 12: mod_base = OTHER; note = Nucleotide with phosphorothioate linkage
  modified_base 13: mod_base = OTHER; note = Nucleotide with phosphorothioate linkage
  modified_base 14: mod_base = OTHER; note = Nucleotide with phosphorothioate linkage
  modified_base 15: mod_base = OTHER; note = beta-D-oxy locked nucleotide with phosphorothioate linkage
  modified_base 16: mod_base = OTHER; note = 5-methyl beta-D-oxy locked nucleotide with phosphorothioate linkage
gcactcaccatacttc

SEQ ID NO: 365 - DNA, 17 bp, synthetic construct
  source 1..17: mol_type = other DNA
  modified_base 1: mod_base = OTHER; note = beta-D-oxy locked nucleotide with phosphorothioate linkage
  modified_base 2: mod_base = OTHER; note = beta-D-oxy locked nucleotide with phosphorothioate linkage
  modified_base 3: mod_base = OTHER; note = Nucleotide with phosphorothioate linkage
  modified_base 4: mod_base = OTHER; note = Nucleotide with phosphorothioate linkage
  modified_base 5: mod_base = OTHER; note = Nucleotide with phosphorothioate linkage
  modified_base 6: mod_base = OTHER; note = Nucleotide with phosphorothioate linkage
  modified_base 7: mod_base = OTHER; note = Nucleotide with phosphorothioate linkage
  modified_base 8: mod_base = OTHER; note = Nucleotide with phosphorothioate linkage
  modified_base 9: mod_base = OTHER; note = Nucleotide with phosphorothioate linkage
  modified_base 10: mod_base = OTHER; note = Nucleotide with phosphorothioate linkage
  modified_base 11: mod_base = OTHER; note = Nucleotide with phosphorothioate linkage
  modified_base 12: mod_base = OTHER; note = Nucleotide with phosphorothioate linkage
  modified_base 13: mod_base = OTHER; note = Nucleotide with phosphorothioate linkage
  modified_base 14: mod_base = OTHER; note = Nucleotide with phosphorothioate linkage
  modified_base 15: mod_base = OTHER; note = Nucleotide with phosphorothioate linkage
  modified_base 16: mod_base = OTHER; note = beta-D-oxy locked nucleotide with phosphorothioate linkage
  modified_base 17: mod_base = OTHER; note = 5-methyl beta-D-oxy locked nucleotide with phosphorothioate linkage
agcactcaccatacttc

SEQ ID NO: 366 - DNA, 18 bp, synthetic construct
  source 1..18: mol_type = other DNA
  modified_base 1: mod_base = OTHER; note = beta-D-oxy locked nucleotide with phosphorothioate linkage
  modified_base 2: mod_base = OTHER; note = 5-methyl beta-D-oxy locked nucleotide with phosphorothioate linkage
  modified_base 3: mod_base = OTHER; note = Nucleotide with phosphorothioate linkage
  modified_base 4: mod_base = OTHER; note = Nucleotide with phosphorothioate linkage
  modified_base 5: mod_base = OTHER; note = Nucleotide with phosphorothioate linkage
  modified_base 6: mod_base = OTHER; note = Nucleotide with phosphorothioate linkage
  modified_base 7: mod_base = OTHER; note = Nucleotide with phosphorothioate linkage
  modified_base 8: mod_base = OTHER; note = Nucleotide with phosphorothioate linkage
  modified_base 9: mod_base = OTHER; note = Nucleotide with phosphorothioate linkage
  modified_base 10: mod_base = OTHER; note = Nucleotide with phosphorothioate linkage
  modified_base 11: mod_base = OTHER; note = Nucleotide with phosphorothioate linkage
  modified_base 12: mod_base = OTHER; note = Nucleotide with phosphorothioate linkage
  modified_base 13: mod_base = OTHER; note = Nucleotide with phosphorothioate linkage
  modified_base 14: mod_base = OTHER; note = Nucleotide with phosphorothioate linkage
  modified_base 15: mod_base = OTHER; note = Nucleotide with phosphorothioate linkage
  modified_base 16: mod_base = OTHER; note = Nucleotide with phosphorothioate linkage
  modified_base 17: mod_base = OTHER; note = beta-D-oxy locked nucleotide with phosphorothioate linkage
  modified_base 18: mod_base = OTHER; note = beta-D-oxy locked nucleotide with phosphorothioate linkage
tcagcactcaccatactt

SEQ ID NO: 367 - DNA, 17 bp, synthetic construct
  source 1..17: mol_type = other DNA
  modified_base 1: mod_base = OTHER; note = 5-methyl beta-D-oxy locked nucleotide with phosphorothioate linkage
  modified_base 2: mod_base = OTHER; note = beta-D-oxy locked nucleotide with phosphorothioate linkage
  modified_base 3: mod_base = OTHER; note = Nucleotide with phosphorothioate linkage
  modified_base 4: mod_base = OTHER; note = Nucleotide with phosphorothioate linkage
  modified_base 5: mod_base = OTHER; note = Nucleotide with phosphorothioate linkage
  modified_base 6: mod_base = OTHER; note = Nucleotide with phosphorothioate linkage
  modified_base 7: mod_base = OTHER; note = Nucleotide with phosphorothioate linkage
  modified_base 8: mod_base = OTHER; note = Nucleotide with phosphorothioate linkage
  modified_base 9: mod_base = OTHER; note = Nucleotide with phosphorothioate linkage
  modified_base 10: mod_base = OTHER; note = Nucleotide with phosphorothioate linkage
  modified_base 11: mod_base = OTHER; note = Nucleotide with phosphorothioate linkage
  modified_base 12: mod_base = OTHER; note = Nucleotide with phosphorothioate linkage
  modified_base 13: mod_base = OTHER; note = Nucleotide with phosphorothioate linkage
  modified_base 14: mod_base = OTHER; note = Nucleotide with phosphorothioate linkage
  modified_base 15: mod_base = OTHER; note = Nucleotide with phosphorothioate linkage
  modified_base 16: mod_base = OTHER; note = beta-D-oxy locked nucleotide with phosphorothioate linkage
  modified_base 17: mod_base = OTHER; note = beta-D-oxy locked nucleotide with phosphorothioate linkage
cagcactcaccatactt

SEQ ID NO: 368 - DNA, 16 bp, synthetic construct
  source 1..16: mol_type = other DNA
  modified_base 1: mod_base = OTHER; note = beta-D-oxy locked nucleotide with phosphorothioate linkage
  modified_base 2: mod_base = OTHER; note = beta-D-oxy locked nucleotide with phosphorothioate linkage
  modified_base 3: mod_base = OTHER; note = Nucleotide with phosphorothioate linkage
  modified_base 4: mod_base = OTHER; note = Nucleotide with phosphorothioate linkage
  modified_base 5: mod_base = OTHER; note = Nucleotide with phosphorothioate linkage
  modified_base 6: mod_base = OTHER; note = Nucleotide with phosphorothioate linkage
  modified_base 7: mod_base = OTHER; note = Nucleotide with phosphorothioate linkage
  modified_base 8: mod_base = OTHER; note = Nucleotide with phosphorothioate linkage
  modified_base 9: mod_base = OTHER; note = Nucleotide with phosphorothioate linkage
  modified_base 10: mod_base = OTHER; note = Nucleotide with phosphorothioate linkage
  modified_base 11: mod_base = OTHER; note = Nucleotide with phosphorothioate linkage
  modified_base 12: mod_base = OTHER; note = Nucleotide with phosphorothioate linkage
  modified_base 13: mod_base = OTHER; note = Nucleotide with phosphorothioate linkage
  modified_base 14: mod_base = OTHER; note = Nucleotide with phosphorothioate linkage
  modified_base 15: mod_base = OTHER; note = beta-D-oxy locked nucleotide with phosphorothioate linkage
  modified_base 16: mod_base = OTHER; note = beta-D-oxy locked nucleotide with phosphorothioate linkage
agcactcaccatactt

SEQ ID NO: 369 - DNA, 17 bp, synthetic construct
  source 1..17: mol_type = other DNA
  modified_base 1: mod_base = OTHER; note = beta-D-oxy locked nucleotide with phosphorothioate linkage
  modified_base 2: mod_base = OTHER; note = 5-methyl beta-D-oxy locked nucleotide with phosphorothioate linkage
  modified_base 3: mod_base = OTHER; note = Nucleotide with phosphorothioate linkage
  modified_base 4: mod_base = OTHER; note = Nucleotide with phosphorothioate linkage
  modified_base 5: mod_base = OTHER; note = Nucleotide with phosphorothioate linkage
  modified_base 6: mod_base = OTHER; note = Nucleotide with phosphorothioate linkage
  modified_base 7: mod_base = OTHER; note = Nucleotide with phosphorothioate linkage
  modified_base 8: mod_base = OTHER; note = Nucleotide with phosphorothioate linkage
  modified_base 9: mod_base = OTHER; note = Nucleotide with phosphorothioate linkage
  modified_base 10: mod_base = OTHER; note = Nucleotide with phosphorothioate linkage
  modified_base 11: mod_base = OTHER; note = Nucleotide with phosphorothioate linkage
  modified_base 12: mod_base = OTHER; note = Nucleotide with phosphorothioate linkage
  modified_base 13: mod_base = OTHER; note = Nucleotide with phosphorothioate linkage
  modified_base 14: mod_base = OTHER; note = Nucleotide with phosphorothioate linkage
  modified_base 15: mod_base = OTHER; note = 5-methyl beta-D-oxy locked nucleotide with phosphorothioate linkage
  modified_base 16: mod_base = OTHER; note = beta-D-oxy locked nucleotide with phosphorothioate linkage
  modified_base 17: mod_base = OTHER; note = beta-D-oxy locked nucleotide with phosphorothioate linkage
acttcagcactcaccat

SEQ ID NO: 370 - DNA, 16 bp, synthetic construct
  source 1..16: mol_type = other DNA
  modified_base 1: mod_base = OTHER; note = beta-D-oxy locked nucleotide with phosphorothioate linkage
  modified_base 2: mod_base = OTHER; note = beta-D-oxy locked nucleotide with phosphorothioate linkage
  modified_base 3: mod_base = OTHER; note = Nucleotide with phosphorothioate linkage
  modified_base 4: mod_base = OTHER; note = Nucleotide with phosphorothioate linkage
  modified_base 5: mod_base = OTHER; note = Nucleotide with phosphorothioate linkage
  modified_base 6: mod_base = OTHER; note = Nucleotide with phosphorothioate linkage
  modified_base 7: mod_base = OTHER; note = Nucleotide with phosphorothioate linkage
  modified_base 8: mod_base = OTHER; note = Nucleotide with phosphorothioate linkage
  modified_base 9: mod_base = OTHER; note = Nucleotide with phosphorothioate linkage
  modified_base 10: mod_base = OTHER; note = Nucleotide with phosphorothioate linkage
  modified_base 11: mod_base = OTHER; note = Nucleotide with phosphorothioate linkage
  modified_base 12: mod_base = OTHER; note = Nucleotide with phosphorothioate linkage
  modified_base 13: mod_base = OTHER; note = Nucleotide with phosphorothioate linkage
  modified_base 14: mod_base = OTHER; note = 5-methyl beta-D-oxy locked nucleotide with phosphorothioate linkage
  modified_base 15: mod_base = OTHER; note = beta-D-oxy locked nucleotide with phosphorothioate linkage
  modified_base 16: mod_base = OTHER; note = 5-methyl beta-D-oxy locked nucleotide with phosphorothioate linkage
gagtaatcttcacctc

SEQ ID NO: 371 - DNA, 17 bp, synthetic construct
  source 1..17: mol_type = other DNA
  modified_base 1: mod_base = OTHER; note = beta-D-oxy locked nucleotide with phosphorothioate linkage
  modified_base 2: mod_base = OTHER; note = beta-D-oxy locked nucleotide with phosphorothioate linkage
  modified_base 3: mod_base = OTHER; note = beta-D-oxy locked nucleotide with phosphorothioate linkage
  modified_base 4: mod_base = OTHER; note = beta-D-oxy locked nucleotide with phosphorothioate linkage
  modified_base 5: mod_base = OTHER; note = Nucleotide with phosphorothioate linkage
  modified_base 6: mod_base = OTHER; note = Nucleotide with phosphorothioate linkage
  modified_base 7: mod_base = OTHER; note = Nucleotide with phosphorothioate linkage
  modified_base 8: mod_base = OTHER; note = Nucleotide with phosphorothioate linkage
  modified_base 9: mod_base = OTHER; note = Nucleotide with phosphorothioate linkage
  modified_base 10: mod_base = OTHER; note = Nucleotide with phosphorothioate linkage
  modified_base 11: mod_base = OTHER; note = Nucleotide with phosphorothioate linkage
  modified_base 12: mod_base = OTHER; note = Nucleotide with phosphorothioate linkage
  modified_base 13: mod_base = OTHER; note = Nucleotide with phosphorothioate linkage
  modified_base 14: mod_base = OTHER; note = beta-D-oxy locked nucleotide with phosphorothioate linkage
  modified_base 15: mod_base = OTHER; note = 5-methyl beta-D-oxy locked nucleotide with phosphorothioate linkage
  modified_base 16: mod_base = OTHER; note = beta-D-oxy locked nucleotide with phosphorothioate linkage
  modified_base 17: mod_base = OTHER; note = 5-methyl beta-D-oxy locked nucleotide with phosphorothioate linkage
taattggatttcatcac

SEQ ID NO: 372 - DNA, 16 bp, synthetic construct
  source 1..16: mol_type = other DNA
  modified_base 1: mod_base = OTHER; note = beta-D-oxy locked nucleotide with phosphorothioate linkage
  modified_base 2: mod_base = OTHER; note = beta-D-oxy locked nucleotide with phosphorothioate linkage
  modified_base 3: mod_base = OTHER; note = Nucleotide with phosphorothioate linkage
  modified_base 4: mod_base = OTHER; note = Nucleotide with phosphorothioate linkage
  modified_base 5: mod_base = OTHER; note = Nucleotide with phosphorothioate linkage
  modified_base 6: mod_base = OTHER; note = Nucleotide with phosphorothioate linkage
  modified_base 7: mod_base = OTHER; note = Nucleotide with phosphorothioate linkage
  modified_base 8: mod_base = OTHER; note = Nucleotide with phosphorothioate linkage
  modified_base 9: mod_base = OTHER; note = Nucleotide with phosphorothioate linkage
  modified_base 10: mod_base = OTHER; note = Nucleotide with phosphorothioate linkage
  modified_base 11: mod_base = OTHER; note = Nucleotide with phosphorothioate linkage
  modified_base 12: mod_base = OTHER; note = Nucleotide with phosphorothioate linkage
  modified_base 13: mod_base = OTHER; note = Nucleotide with phosphorothioate linkage
  modified_base 14: mod_base = OTHER; note = Nucleotide with phosphorothioate linkage
  modified_base 15: mod_base = OTHER; note = beta-D-oxy locked nucleotide with phosphorothioate linkage
  modified_base 16: mod_base = OTHER; note = beta-D-oxy locked nucleotide with phosphorothioate linkage
gacgctaccctacctt

SEQ ID NO: 373 - DNA, 16 bp, synthetic construct
  source 1..16: mol_type = other DNA
  modified_base 1: mod_base = OTHER; note = beta-D-oxy locked nucleotide with phosphorothioate linkage
  modified_base 2: mod_base = OTHER; note = beta-D-oxy locked nucleotide with phosphorothioate linkage
  modified_base 3: mod_base = OTHER; note = Nucleotide with phosphorothioate linkage
  modified_base 4: mod_base = OTHER; note = Nucleotide with phosphorothioate linkage
  modified_base 5: mod_base = OTHER; note = Nucleotide with phosphorothioate linkage
  modified_base 6: mod_base = OTHER; note = Nucleotide with phosphorothioate linkage
  modified_base 7: mod_base = OTHER; note = Nucleotide with phosphorothioate linkage
  modified_base 8: mod_base = OTHER; note = Nucleotide with phosphorothioate linkage
  modified_base 9: mod_base = OTHER; note = Nucleotide with phosphorothioate linkage
  modified_base 10: mod_base = OTHER; note = Nucleotide with phosphorothioate linkage
  modified_base 11: mod_base = OTHER; note = Nucleotide with phosphorothioate linkage
  modified_base 12: mod_base = OTHER; note = Nucleotide with phosphorothioate linkage
  modified_base 13: mod_base = OTHER; note = Nucleotide with phosphorothioate linkage
  modified_base 14: mod_base = OTHER; note = Nucleotide with phosphorothioate linkage
  modified_base 15: mod_base = OTHER; note = 5-methyl beta-D-oxy locked nucleotide with phosphorothioate linkage
  modified_base 16: mod_base = OTHER; note = beta-D-oxy locked nucleotide with phosphorothioate linkage
tgacgctaccctacct

SEQ ID NO: 374 - DNA, 15 bp, synthetic construct
  source 1..15: mol_type = other DNA
  modified_base 1: mod_base = OTHER; note = beta-D-oxy locked nucleotide with phosphorothioate linkage
  modified_base 2: mod_base = OTHER; note = beta-D-oxy locked nucleotide with phosphorothioate linkage
  modified_base 3: mod_base = OTHER; note = Nucleotide with phosphorothioate linkage
  modified_base 4: mod_base = OTHER; note = Nucleotide with phosphorothioate linkage
  modified_base 5: mod_base = OTHER; note = Nucleotide with phosphorothioate linkage
  modified_base 6: mod_base = OTHER; note = Nucleotide with phosphorothioate linkage
  modified_base 7: mod_base = OTHER; note = Nucleotide with phosphorothioate linkage
  modified_base 8: mod_base = OTHER; note = Nucleotide with phosphorothioate linkage
  modified_base 9: mod_base = OTHER; note = Nucleotide with phosphorothioate linkage
  modified_base 10: mod_base = OTHER; note = Nucleotide with phosphorothioate linkage
  modified_base 11: mod_base = OTHER; note = Nucleotide with phosphorothioate linkage
  modified_base 12: mod_base = OTHER; note = Nucleotide with phosphorothioate linkage
  modified_base 13: mod_base = OTHER; note = Nucleotide with phosphorothioate linkage
  modified_base 14: mod_base = OTHER; note = 5-methyl beta-D-oxy locked nucleotide with phosphorothioate linkage
  modified_base 15: mod_base = OTHER; note = beta-D-oxy locked nucleotide with phosphorothioate linkage
gacgctaccctacct

SEQ ID NO: 375 - DNA, 16 bp, synthetic construct
  source 1..16: mol_type = other DNA
  modified_base 1: mod_base = OTHER; note = beta-D-oxy locked nucleotide with phosphorothioate linkage
  modified_base 2: mod_base = OTHER; note = beta-D-oxy locked nucleotide with phosphorothioate linkage
  modified_base 3: mod_base = OTHER; note = Nucleotide with phosphorothioate linkage
  modified_base 4: mod_base = OTHER; note = Nucleotide with phosphorothioate linkage
  modified_base 5: mod_base = OTHER; note = Nucleotide with phosphorothioate linkage
  modified_base 6: mod_base = OTHER; note = Nucleotide with phosphorothioate linkage
  modified_base 7: mod_base = OTHER; note = Nucleotide with phosphorothioate linkage
  modified_base 8: mod_base = OTHER; note = Nucleotide with phosphorothioate linkage
  modified_base 9: mod_base = OTHER; note = Nucleotide with phosphorothioate linkage
  modified_base 10: mod_base = OTHER; note = Nucleotide with phosphorothioate linkage
  modified_base 11: mod_base = OTHER; note = Nucleotide with phosphorothioate linkage
  modified_base 12: mod_base = OTHER; note = Nucleotide with phosphorothioate linkage
  modified_base 13: mod_base = OTHER; note = Nucleotide with phosphorothioate linkage
  modified_base 14: mod_base = OTHER; note = Nucleotide with phosphorothioate linkage
  modified_base 15: mod_base = OTHER; note = 5-methyl beta-D-oxy locked nucleotide with phosphorothioate linkage
  modified_base 16: mod_base = OTHER; note = 5-methyl beta-D-oxy locked nucleotide with phosphorothioate linkage
ttgacgctaccctacc

SEQ ID NO: 376 - DNA, 15 bp, synthetic construct
  source 1..15: mol_type = other DNA
  modified_base 1: mod_base = OTHER; note = beta-D-oxy locked nucleotide with phosphorothioate linkage
  modified_base 2: mod_base = OTHER; note = beta-D-oxy locked nucleotide with phosphorothioate linkage
  modified_base 3: mod_base = OTHER; note = Nucleotide with phosphorothioate linkage
  modified_base 4: mod_base = OTHER; note = Nucleotide with phosphorothioate linkage
  modified_base 5: mod_base = OTHER; note = Nucleotide with phosphorothioate linkage
  modified_base 6: mod_base = OTHER; note = Nucleotide with phosphorothioate linkage
  modified_base 7: mod_base = OTHER; note = Nucleotide with phosphorothioate linkage
  modified_base 8: mod_base = OTHER; note = Nucleotide with phosphorothioate linkage
  modified_base 9: mod_base = OTHER; note = Nucleotide with phosphorothioate linkage
  modified_base 10: mod_base = OTHER; note = Nucleotide with phosphorothioate linkage
  modified_base 11: mod_base = OTHER; note = Nucleotide with phosphorothioate linkage
  modified_base 12: mod_base = OTHER; note = 5-methyl beta-D-oxy locked nucleotide with phosphorothioate linkage
  modified_base 13: mod_base = OTHER; note = beta-D-oxy locked nucleotide with phosphorothioate linkage
  modified_base 14: mod_base = OTHER; note = beta-D-oxy locked nucleotide with phosphorothioate linkage
  modified_base 15: mod_base = OTHER; note = 5-methyl beta-D-oxy locked nucleotide with phosphorothioate linkage
ttgacgctaccctac

SEQ ID NO: 377 - DNA, 16 bp, synthetic construct
  source 1..16: mol_type = other DNA
  modified_base 1: mod_base = OTHER; note = 5-methyl beta-D-oxy locked nucleotide with phosphorothioate linkage
  modified_base 2: mod_base = OTHER; note = beta-D-oxy locked nucleotide with phosphorothioate linkage
  modified_base 3: mod_base = OTHER; note = Nucleotide with phosphorothioate linkage
  modified_base 4: mod_base = OTHER; note = Nucleotide with phosphorothioate linkage
  modified_base 5: mod_base = OTHER; note = Nucleotide with phosphorothioate linkage
  modified_base 6: mod_base = OTHER; note = Nucleotide with phosphorothioate linkage
  modified_base 7: mod_base = OTHER; note = Nucleotide with phosphorothioate linkage
  modified_base 8: mod_base = OTHER; note = Nucleotide with phosphorothioate linkage
  modified_base 9: mod_base = OTHER; note = Nucleotide with phosphorothioate linkage
  modified_base 10: mod_base = OTHER; note = Nucleotide with phosphorothioate linkage
  modified_base 11: mod_base = OTHER; note = Nucleotide with phosphorothioate linkage
  modified_base 12: mod_base = OTHER; note = Nucleotide with phosphorothioate linkage
  modified_base 13: mod_base = OTHER; note = Nucleotide with phosphorothioate linkage
  modified_base 14: mod_base = OTHER; note = Nucleotide with phosphorothioate linkage
  modified_base 15: mod_base = OTHER; note = beta-D-oxy locked nucleotide with phosphorothioate linkage
  modified_base 16: mod_base = OTHER; note = 5-methyl beta-D-oxy locked nucleotide with phosphorothioate linkage
cttgacgctaccctac

SEQ ID NO: 378 - DNA, 15 bp, synthetic construct
  source 1..15: mol_type = other DNA
  modified_base 1: mod_base = OTHER; note = 5-methyl beta-D-oxy locked nucleotide with phosphorothioate linkage
  modified_base 2: mod_base = OTHER; note = beta-D-oxy locked nucleotide with phosphorothioate linkage
  modified_base 3: mod_base = OTHER; note = Nucleotide with phosphorothioate linkage
  modified_base 4: mod_base = OTHER; note = Nucleotide with phosphorothioate linkage
  modified_base 5: mod_base = OTHER; note = Nucleotide with phosphorothioate linkage
  modified_base 6: mod_base = OTHER; note = Nucleotide with phosphorothioate linkage
  modified_base 7: mod_base = OTHER; note = Nucleotide with phosphorothioate linkage
  modified_base 8: mod_base = OTHER; note = Nucleotide with phosphorothioate linkage
  modified_base 9: mod_base = OTHER; note = Nucleotide with phosphorothioate linkage
  modified_base 10: mod_base = OTHER; note = Nucleotide with phosphorothioate linkage
  modified_base 11: mod_base = OTHER; note = Nucleotide with phosphorothioate linkage
  modified_base 12: mod_base = OTHER; note = Nucleotide with phosphorothioate linkage
  modified_base 13: mod_base = OTHER; note = Nucleotide with phosphorothioate linkage
  modified_base 14: mod_base = OTHER; note = beta-D-oxy locked nucleotide with phosphorothioate linkage
  modified_base 15: mod_base = OTHER; note = beta-D-oxy locked nucleotide with phosphorothioate linkage
cttgacgctacccta

SEQ ID NO: 379 - DNA, 16 bp, synthetic construct
  source 1..16: mol_type = other DNA
  modified_base 1: mod_base = OTHER; note = 5-methyl beta-D-oxy locked nucleotide with phosphorothioate linkage
  modified_base 2: mod_base = OTHER; note = 5-methyl beta-D-oxy locked nucleotide with phosphorothioate linkage
  modified_base 3: mod_base = OTHER; note = Nucleotide with phosphorothioate linkage
  modified_base 4: mod_base = OTHER; note = Nucleotide with phosphorothioate linkage
  modified_base 5: mod_base = OTHER; note = Nucleotide with phosphorothioate linkage
  modified_base 6: mod_base = OTHER; note = Nucleotide with phosphorothioate linkage
  modified_base 7: mod_base = OTHER; note = Nucleotide with phosphorothioate linkage
  modified_base 8: mod_base = OTHER; note = Nucleotide with phosphorothioate linkage
  modified_base 9: mod_base = OTHER; note = Nucleotide with phosphorothioate linkage
  modified_base 10: mod_base = OTHER; note = Nucleotide with phosphorothioate linkage
  modified_base 11: mod_base = OTHER; note = Nucleotide with phosphorothioate linkage
  modified_base 12: mod_base = OTHER; note = Nucleotide with phosphorothioate linkage
  modified_base 13: mod_base = OTHER; note = Nucleotide with phosphorothioate linkage
  modified_base 14: mod_base = OTHER; note = Nucleotide with phosphorothioate linkage
  modified_base 15: mod_base = OTHER; note = beta-D-oxy locked nucleotide with phosphorothioate linkage
  modified_base 16: mod_base = OTHER; note = beta-D-oxy locked nucleotide with phosphorothioate linkage
ccttccaccaactaag

SEQ ID NO: 380 - DNA, 17 bp, synthetic construct
  source 1..17: mol_type = other DNA
  modified_base 1: mod_base = OTHER; note = beta-D-oxy locked nucleotide with phosphorothioate linkage
  modified_base 2: mod_base = OTHER; note = beta-D-oxy locked nucleotide with phosphorothioate linkage
  modified_base 3: mod_base = OTHER; note = beta-D-oxy locked nucleotide with phosphorothioate linkage
  modified_base 4: mod_base = OTHER; note = beta-D-oxy locked nucleotide with phosphorothioate linkage
  modified_base 5: mod_base = OTHER; note = Nucleotide with phosphorothioate linkage
  modified_base 6: mod_base = OTHER; note = Nucleotide with phosphorothioate linkage
  modified_base 7: mod_base = OTHER; note = Nucleotide with phosphorothioate linkage
  modified_base 8: mod_base = OTHER; note = Nucleotide with phosphorothioate linkage
  modified_base 9: mod_base = OTHER; note = Nucleotide with phosphorothioate linkage
  modified_base 10: mod_base = OTHER; note = Nucleotide with phosphorothioate linkage
  modified_base 11: mod_base = OTHER; note = Nucleotide with phosphorothioate linkage
  modified_base 12: mod_base = OTHER; note = Nucleotide with phosphorothioate linkage
  modified_base 13: mod_base = OTHER; note = Nucleotide with phosphorothioate linkage
  modified_base 14: mod_base = OTHER; note = beta-D-oxy locked nucleotide with phosphorothioate linkage
  modified_base 15: mod_base = OTHER; note = 5-methyl beta-D-oxy locked nucleotide with phosphorothioate linkage
  modified_base 16: mod_base = OTHER; note = 5-methyl beta-D-oxy locked nucleotide with phosphorothioate linkage
  modified_base 17: mod_base = OTHER; note = beta-D-oxy locked nucleotide with phosphorothioate linkage
aatattgattttatcca

SEQ ID NO: 381 - DNA, 17 bp, synthetic construct
  source 1..17: mol_type = other DNA
  modified_base 1: mod_base = OTHER; note = 5-methyl beta-D-oxy locked nucleotide with phosphorothioate linkage
  modified_base 2: mod_base = OTHER; note = beta-D-oxy locked nucleotide with phosphorothioate linkage
  modified_base 3: mod_base = OTHER; note = beta-D-oxy locked nucleotide with phosphorothioate linkage
  modified_base 4: mod_base = OTHER; note = Nucleotide with phosphorothioate linkage
  modified_base 5: mod_base = OTHER; note = Nucleotide with phosphorothioate linkage
  modified_base 6: mod_base = OTHER; note = Nucleotide with phosphorothioate linkage
  modified_base 7: mod_base = OTHER; note = Nucleotide with phosphorothioate linkage
  modified_base 8: mod_base = OTHER; note = Nucleotide with phosphorothioate linkage
  modified_base 9: mod_base = OTHER; note = Nucleotide with phosphorothioate linkage
  modified_base 10: mod_base = OTHER; note = Nucleotide with phosphorothioate linkage
  modified_base 11: mod_base = OTHER; note = Nucleotide with phosphorothioate linkage
  modified_base 12: mod_base = OTHER; note = Nucleotide with phosphorothioate linkage
  modified_base 13: mod_base = OTHER; note = Nucleotide with phosphorothioate linkage
  modified_base 14: mod_base = OTHER; note = beta-D-oxy locked nucleotide with phosphorothioate linkage
  modified_base 15: mod_base = OTHER; note = beta-D-oxy locked nucleotide with phosphorothioate linkage
  modified_base 16: mod_base = OTHER; note = 5-methyl beta-D-oxy locked nucleotide with phosphorothioate linkage
  modified_base 17: mod_base = OTHER; note = 5-methyl beta-D-oxy locked nucleotide with phosphorothioate linkage
caatattgattttatcc

SEQ ID NO: 382 - DNA, 18 bp, synthetic construct
  source 1..18: mol_type = other DNA
  modified_base 1: mod_base = OTHER; note = 5-methyl beta-D-oxy locked nucleotide with phosphorothioate linkage
  modified_base 2: mod_base = OTHER; note = 5-methyl beta-D-oxy locked nucleotide with phosphorothioate linkage
  modified_base 3: mod_base = OTHER; note = Nucleotide with phosphorothioate linkage
  modified_base 4: mod_base = OTHER; note = Nucleotide with phosphorothioate linkage
  modified_base 5: mod_base = OTHER; note = Nucleotide with phosphorothioate linkage
  modified_base 6: mod_base = OTHER; note = Nucleotide with phosphorothioate linkage
  modified_base 7: mod_base = OTHER; note = Nucleotide with phosphorothioate linkage
  modified_base 8: mod_base = OTHER; note = Nucleotide with phosphorothioate linkage
  modified_base 9: mod_base = OTHER; note = Nucleotide with phosphorothioate linkage
  modified_base 10: mod_base = OTHER; note = Nucleotide with phosphorothioate linkage
  modified_base 11: mod_base = OTHER; note = Nucleotide with phosphorothioate linkage
  modified_base 12: mod_base = OTHER; note = Nucleotide with phosphorothioate linkage
  modified_base 13: mod_base = OTHER; note = Nucleotide with phosphorothioate linkage
  modified_base 14: mod_base = OTHER; note = Nucleotide with phosphorothioate linkage
  modified_base 15: mod_base = OTHER; note = Nucleotide with phosphorothioate linkage
  modified_base 16: mod_base = OTHER; note = beta-D-oxy locked nucleotide with phosphorothioate linkage
  modified_base 17: mod_base = OTHER; note = 5-methyl beta-D-oxy locked nucleotide with phosphorothioate linkage
  modified_base 18: mod_base = OTHER; note = 5-methyl beta-D-oxy locked nucleotide with phosphorothioate linkage
ccaatattgattttatcc

SEQ ID NO: 383 - DNA, 17 bp, synthetic construct
  source 1..17: mol_type = other DNA
  modified_base 1: mod_base = OTHER; note = beta-D-oxy locked nucleotide with phosphorothioate linkage
  modified_base 2: mod_base = OTHER; note = 5-methyl beta-D-oxy locked nucleotide with phosphorothioate linkage
  modified_base 3: mod_base = OTHER; note = Nucleotide with phosphorothioate linkage
  modified_base 4: mod_base = OTHER; note = Nucleotide with phosphorothioate linkage
  modified_base 5: mod_base = OTHER; note = Nucleotide with phosphorothioate linkage
  modified_base 6: mod_base = OTHER; note = Nucleotide with phosphorothioate linkage
  modified_base 7: mod_base = OTHER; note = Nucleotide with phosphorothioate linkage
  modified_base 8: mod_base = OTHER; note = Nucleotide with phosphorothioate linkage
  modified_base 9: mod_base = OTHER; note = Nucleotide with phosphorothioate linkage
  modified_base 10: mod_base = OTHER; note = Nucleotide with phosphorothioate linkage
  modified_base 11: mod_base = OTHER; note = Nucleotide with phosphorothioate linkage
  modified_base 12: mod_base = OTHER; note = Nucleotide with phosphorothioate linkage
  modified_base 13: mod_base = OTHER; note = Nucleotide with phosphorothioate linkage
  modified_base 14: mod_base = OTHER; note = Nucleotide with phosphorothioate linkage
  modified_base 15: mod_base = OTHER; note = Nucleotide with phosphorothioate linkage
  modified_base 16: mod_base = OTHER; note = beta-D-oxy locked nucleotide with phosphorothioate linkage
  modified_base 17: mod_base = OTHER; note = beta-D-oxy locked nucleotide with phosphorothioate linkage
tctctgaccccaatatt

SEQ ID NO: 384 - DNA, 18 bp, synthetic construct
  source 1..18: mol_type = other DNA
  modified_base 1: mod_base = OTHER; note = 5-methyl beta-D-oxy locked nucleotide with phosphorothioate linkage
  modified_base 2: mod_base = OTHER; note = beta-D-oxy locked nucleotide with phosphorothioate linkage
  modified_base 3: mod_base = OTHER; note = beta-D-oxy locked nucleotide with phosphorothioate linkage
  modified_base 4: mod_base = OTHER; note = beta-D-oxy locked nucleotide with phosphorothioate linkage
  modified_base 5: mod_base = OTHER; note = Nucleotide with phosphorothioate linkage
  modified_base 6: mod_base = OTHER; note = Nucleotide with phosphorothioate linkage
  modified_base 7: mod_base = OTHER; note = Nucleotide with phosphorothioate linkage
  modified_base 8: mod_base = OTHER; note = Nucleotide with phosphorothioate linkage
  modified_base 9: mod_base = OTHER; note = Nucleotide with phosphorothioate linkage
  modified_base 10: mod_base = OTHER; note = Nucleotide with phosphorothioate linkage
  modified_base 11: mod_base = OTHER; note = Nucleotide with phosphorothioate linkage
  modified_base 12: mod_base = OTHER; note = Nucleotide with phosphorothioate linkage
  modified_base 13: mod_base = OTHER; note = Nucleotide with phosphorothioate linkage
  modified_base 14: mod_base = OTHER; note = Nucleotide with phosphorothioate linkage
  modified_base 15: mod_base = OTHER; note = beta-D-oxy locked nucleotide with phosphorothioate linkage
  modified_base 16: mod_base = OTHER; note = beta-D-oxy locked nucleotide with phosphorothioate linkage
  modified_base 17: mod_base = OTHER; note = 5-methyl beta-D-oxy locked nucleotide with phosphorothioate linkage
  modified_base 18: mod_base = OTHER; note = beta-D-oxy locked nucleotide with phosphorothioate linkage
catttgcatttttaaact

SEQ ID NO: 385 - DNA, 18 bp, synthetic construct
  source 1..18: mol_type = other DNA
  modified_base 1: mod_base = OTHER; note = 5-methyl beta-D-oxy locked nucleotide with phosphorothioate linkage
  modified_base 2: mod_base = OTHER; note = 5-methyl beta-D-oxy locked nucleotide with phosphorothioate linkage
  modified_base 3: mod_base = OTHER; note = beta-D-oxy locked nucleotide with phosphorothioate linkage
  modified_base 4: mod_base = OTHER; note = beta-D-oxy locked nucleotide with phosphorothioate linkage
  modified_base 5: mod_base = OTHER; note = Nucleotide with phosphorothioate linkage
  modified_base 6: mod_base = OTHER; note = Nucleotide with phosphorothioate linkage
  modified_base 7: mod_base = OTHER; note = Nucleotide with phosphorothioate linkage
  modified_base 8: mod_base = OTHER; note = Nucleotide with phosphorothioate linkage
  modified_base 9: mod_base = OTHER; note = Nucleotide with phosphorothioate linkage
  modified_base 10: mod_base = OTHER; note = Nucleotide with phosphorothioate linkage
  modified_base 11: mod_base = OTHER; note = Nucleotide with phosphorothioate linkage
  modified_base 12: mod_base = OTHER; note = Nucleotide with phosphorothioate linkage
  modified_base 13: mod_base = OTHER; note = Nucleotide with phosphorothioate linkage
  modified_base 14: mod_base = OTHER; note = Nucleotide with phosphorothioate linkage
  modified_base 15: mod_base = OTHER; note = Nucleotide with phosphorothioate linkage
  modified_base 16: mod_base = OTHER; note = Nucleotide with phosphorothioate linkage
  modified_base 17: mod_base = OTHER; note = beta-D-oxy locked nucleotide with phosphorothioate linkage
  modified_base 18: mod_base = OTHER; note = 5-methyl beta-D-oxy locked nucleotide with phosphorothioate linkage
ccatttgcatttttaaac

SEQ ID NO: 386 - DNA, 16 bp, synthetic construct
  source 1..16: mol_type = other DNA
  modified_base 1: mod_base = OTHER; note = beta-D-oxy locked nucleotide with phosphorothioate linkage
  modified_base 2: mod_base = OTHER; note = beta-D-oxy locked nucleotide with phosphorothioate linkage
  modified_base 3: mod_base = OTHER; note = 5-methyl beta-D-oxy locked nucleotide with phosphorothioate linkage
  modified_base 4: mod_base = OTHER; note = Nucleotide with phosphorothioate linkage
  modified_base 5: mod_base = OTHER; note = Nucleotide with phosphorothioate linkage
  modified_base 6: mod_base = OTHER; note = Nucleotide with phosphorothioate linkage
  modified_base 7: mod_base = OTHER; note = Nucleotide with phosphorothioate linkage
  modified_base 8: mod_base = OTHER; note = Nucleotide with phosphorothioate linkage
  modified_base 9: mod_base = OTHER; note = Nucleotide with phosphorothioate linkage
  modified_base 10: mod_base = OTHER; note = Nucleotide with phosphorothioate linkage
  modified_base 11: mod_base = OTHER; note = Nucleotide with phosphorothioate linkage
  modified_base 12: mod_base = OTHER; note = Nucleotide with phosphorothioate linkage
  modified_base 13: mod_base = OTHER; note = Nucleotide with phosphorothioate linkage
  modified_base 14: mod_base = OTHER; note = Nucleotide with phosphorothioate linkage
  modified_base 15: mod_base = OTHER; note = 5-methyl beta-D-oxy locked nucleotide with phosphorothioate linkage
  modified_base 16: mod_base = OTHER; note = 5-methyl beta-D-oxy locked nucleotide with phosphorothioate linkage
aacaactcatgcaccc

SEQ ID NO: 387 - DNA, 17 bp, synthetic construct
  source 1..17: mol_type = other DNA
  modified_base 1: mod_base = OTHER; note = 5-methyl beta-D-oxy locked nucleotide with phosphorothioate linkage
  modified_base 2: mod_base = OTHER; note = 5-methyl beta-D-oxy locked nucleotide with phosphorothioate linkage
  modified_base 3: mod_base = OTHER; note = Nucleotide with phosphorothioate linkage
  modified_base 4: mod_base = OTHER; note = Nucleotide with phosphorothioate linkage
  modified_base 5: mod_base = OTHER; note = Nucleotide with phosphorothioate linkage
  modified_base 6: mod_base = OTHER; note = Nucleotide with phosphorothioate linkage
  modified_base 7: mod_base = OTHER; note = Nucleotide with phosphorothioate linkage
  modified_base 8: mod_base = OTHER; note = Nucleotide with phosphorothioate linkage
  modified_base 9: mod_base = OTHER; note = Nucleotide with phosphorothioate linkage
  modified_base 10: mod_base = OTHER; note = Nucleotide with phosphorothioate linkage
  modified_base 11: mod_base = OTHER; note = Nucleotide with phosphorothioate linkage
  modified_base 12: mod_base = OTHER; note = Nucleotide with phosphorothioate linkage
  modified_base 13: mod_base = OTHER; note = Nucleotide with phosphorothioate linkage
  modified_base 14: mod_base = OTHER; note = Nucleotide with phosphorothioate linkage
  modified_base 15: mod_base = OTHER; note = 5-methyl beta-D-oxy locked nucleotide with phosphorothioate linkage
  modified_base 16: mod_base = OTHER; note = beta-D-oxy locked nucleotide with phosphorothioate linkage
  modified_base 17: mod_base = OTHER; note = beta-D-oxy locked nucleotide with phosphorothioate linkage
cccaggaaacaactcat

SEQ ID NO: 388 - DNA, 17 bp, synthetic construct
  source 1..17: mol_type = other DNA
  modified_base 1: mod_base = OTHER; note = 5-methyl beta-D-oxy locked nucleotide with phosphorothioate linkage
  modified_base 2: mod_base = OTHER; note = beta-D-oxy locked nucleotide with phosphorothioate linkage
  modified_base 3: mod_base = OTHER; note = 5-methyl beta-D-oxy locked nucleotide with phosphorothioate linkage
  modified_base 4: mod_base = OTHER; note = Nucleotide with phosphorothioate linkage
  modified_base 5: mod_base = OTHER; note = Nucleotide with phosphorothioate linkage
  modified_base 6: mod_base = OTHER; note = Nucleotide with phosphorothioate linkage
  modified_base 7: mod_base = OTHER; note = Nucleotide with phosphorothioate linkage
  modified_base 8: mod_base = OTHER; note = Nucleotide with phosphorothioate linkage
  modified_base 9: mod_base = OTHER; note = Nucleotide with phosphorothioate linkage
  modified_base 10: mod_base = OTHER; note = Nucleotide with phosphorothioate linkage
  modified_base 11: mod_base = OTHER; note = Nucleotide with phosphorothioate linkage
  modified_base 12: mod_base = OTHER; note = Nucleotide with phosphorothioate linkage
  modified_base 13: mod_base = OTHER; note = Nucleotide with phosphorothioate linkage
  modified_base 14: mod_base = OTHER; note = Nucleotide with phosphorothioate linkage
  modified_base 15: mod_base = OTHER; note = Nucleotide with phosphorothioate linkage
  modified_base 16: mod_base = OTHER; note = beta-D-oxy locked nucleotide with phosphorothioate linkage
  modified_base 17: mod_base = OTHER; note = 5-methyl beta-D-oxy locked nucleotide with phosphorothioate linkage
cacccaggaaacaactc

SEQ ID NO: 389 - DNA, 17 bp, synthetic construct
  source 1..17: mol_type = other DNA
  modified_base 1: mod_base = OTHER; note = 5-methyl beta-D-oxy locked nucleotide with phosphorothioate linkage
  modified_base 2: mod_base = OTHER; note = beta-D-oxy locked nucleotide with phosphorothioate linkage
  modified_base 3: mod_base = OTHER; note = Nucleotide with phosphorothioate linkage
  modified_base 4: mod_base = OTHER; note = Nucleotide with phosphorothioate linkage
  modified_base 5: mod_base = OTHER; note = Nucleotide with phosphorothioate linkage
  modified_base 6: mod_base = OTHER; note = Nucleotide with phosphorothioate linkage
  modified_base 7: mod_base = OTHER; note = Nucleotide with phosphorothioate linkage
  modified_base 8: mod_base = OTHER; note = Nucleotide with phosphorothioate linkage
  modified_base 9: mod_base = OTHER; note = Nucleotide with phosphorothioate linkage
  modified_base 10: mod_base = OTHER; note = Nucleotide with phosphorothioate linkage
  modified_base 11: mod_base = OTHER; note = Nucleotide with phosphorothioate linkage
  modified_base 12: mod_base = OTHER; note = Nucleotide with phosphorothioate linkage
  modified_base 13: mod_base = OTHER; note = Nucleotide with phosphorothioate linkage
  modified_base 14: mod_base = OTHER; note = Nucleotide with phosphorothioate linkage
  modified_base 15: mod_base = OTHER; note = Nucleotide with phosphorothioate linkage
  modified_base 16: mod_base = OTHER; note = beta-D-oxy locked nucleotide with phosphorothioate linkage
  modified_base 17: mod_base = OTHER; note = beta-D-oxy locked nucleotide with phosphorothioate linkage
caagtcccacataccat

SEQ ID NO: 390 - DNA, 17 bp, synthetic construct
  source 1..17: mol_type = other DNA
  modified_base 1: mod_base = OTHER; note = beta-D-oxy locked nucleotide with phosphorothioate linkage
  modified_base 2: mod_base = OTHER; note = beta-D-oxy locked nucleotide with phosphorothioate linkage
  modified_base 3: mod_base = OTHER; note = Nucleotide with phosphorothioate linkage
  modified_base 4: mod_base = OTHER; note = Nucleotide with phosphorothioate linkage
  modified_base 5: mod_base = OTHER; note = Nucleotide with phosphorothioate linkage
  modified_base 6: mod_base = OTHER; note = Nucleotide with phosphorothioate linkage
  modified_base 7: mod_base = OTHER; note = Nucleotide with phosphorothioate linkage
  modified_base 8: mod_base = OTHER; note = Nucleotide with phosphorothioate linkage
  modified_base 9: mod_base = OTHER; note = Nucleotide with phosphorothioate linkage
  modified_base 10: mod_base = OTHER; note = Nucleotide with phosphorothioate linkage
  modified_base 11: mod_base = OTHER; note = Nucleotide with phosphorothioate linkage
  modified_base 12: mod_base = OTHER; note = Nucleotide with phosphorothioate linkage
  modified_base 13: mod_base = OTHER; note = Nucleotide with phosphorothioate linkage
  modified_base 14: mod_base = OTHER; note = Nucleotide with phosphorothioate linkage
  modified_base 15: mod_base = OTHER; note = Nucleotide with phosphorothioate linkage
  modified_base 16: mod_base = OTHER; note = beta-D-oxy locked nucleotide with phosphorothioate linkage
  modified_base 17: mod_base = OTHER; note = 5-methyl beta-D-oxy locked nucleotide with phosphorothioate linkage
tataccccaagtcccac

SEQ ID NO: 391 - DNA, 16 bp, synthetic construct
  source 1..16: mol_type = other DNA
  modified_base 1: mod_base = OTHER; note = beta-D-oxy locked nucleotide with phosphorothioate linkage
  modified_base 2: mod_base = OTHER; note = 5-methyl beta-D-oxy locked nucleotide with phosphorothioate linkage
  modified_base 3: mod_base = OTHER; note = Nucleotide with phosphorothioate linkage
  modified_base 4: mod_base = OTHER; note = Nucleotide with phosphorothioate linkage
  modified_base 5: mod_base = OTHER; note = Nucleotide with phosphorothioate linkage
  modified_base 6: mod_base = OTHER; note = Nucleotide with phosphorothioate linkage
  modified_base 7: mod_base = OTHER; note = Nucleotide with phosphorothioate linkage
  modified_base 8: mod_base = OTHER; note = Nucleotide with phosphorothioate linkage
  modified_base 9: mod_base = OTHER; note = Nucleotide with phosphorothioate linkage
  modified_base 10: mod_base = OTHER; note = Nucleotide with phosphorothioate linkage
  modified_base 11: mod_base = OTHER; note = Nucleotide with phosphorothioate linkage
  modified_base 12: mod_base = OTHER; note = Nucleotide with phosphorothioate linkage
  modified_base 13: mod_base = OTHER; note = Nucleotide with phosphorothioate linkage
  modified_base 14: mod_base = OTHER; note = Nucleotide with phosphorothioate linkage
  modified_base 15: mod_base = OTHER; note = beta-D-oxy locked nucleotide with phosphorothioate linkage
  modified_base 16: mod_base = OTHER; note = beta-D-oxy locked nucleotide with phosphorothioate linkage
actcctataccccaag

SEQ ID NO: 392 - DNA, 16 bp, synthetic construct
  source 1..16: mol_type = other DNA
  modified_base 1: mod_base = OTHER; note = 5-methyl beta-D-oxy locked nucleotide with phosphorothioate linkage
  modified_base 2: mod_base = OTHER; note = beta-D-oxy locked nucleotide with phosphorothioate linkage
  modified_base 3: mod_base = OTHER; note = beta-D-oxy locked nucleotide with phosphorothioate linkage
  modified_base 4: mod_base = OTHER; note = Nucleotide with phosphorothioate linkage
  modified_base 5: mod_base = OTHER; note = Nucleotide with phosphorothioate linkage
  modified_base 6: mod_base = OTHER; note = Nucleotide with phosphorothioate linkage
  modified_base 7: mod_base = OTHER; note = Nucleotide with phosphorothioate linkage
  modified_base 8: mod_base = OTHER; note = Nucleotide with phosphorothioate linkage
  modified_base 9: mod_base = OTHER; note = Nucleotide with phosphorothioate linkage
  modified_base 10: mod_base = OTHER; note = Nucleotide with phosphorothioate linkage
  modified_base 11: mod_base = OTHER; note = Nucleotide with phosphorothioate linkage
  modified_base 12: mod_base = OTHER; note = Nucleotide with phosphorothioate linkage
  modified_base 13: mod_base = OTHER; note = Nucleotide with phosphorothioate linkage
  modified_base 14: mod_base = OTHER; note = Nucleotide with phosphorothioate linkage
  modified_base 15: mod_base = OTHER; note = 5-methyl beta-D-oxy locked nucleotide with phosphorothioate linkage
  modified_base 16: mod_base = OTHER; note = beta-D-oxy locked nucleotide with phosphorothioate linkage
ctaaaccagtcatcct

SEQ ID NO: 393 - DNA, 16 bp, synthetic construct
  source 1..16: mol_type = other DNA
  modified_base 1: mod_base = OTHER; note = beta-D-oxy locked nucleotide with phosphorothioate linkage
  modified_base 2: mod_base = OTHER; note = 5-methyl beta-D-oxy locked nucleotide with phosphorothioate linkage
  modified_base 3: mod_base = OTHER; note = Nucleotide with phosphorothioate linkage
  modified_base 4: mod_base = OTHER; note = Nucleotide with phosphorothioate linkage
  modified_base 5: mod_base = OTHER; note = Nucleotide with phosphorothioate linkage
  modified_base 6: mod_base = OTHER; note = Nucleotide with phosphorothioate linkage
  modified_base 7: mod_base = OTHER; note = Nucleotide with phosphorothioate linkage
  modified_base 8: mod_base = OTHER; note = Nucleotide with phosphorothioate linkage
  modified_base 9: mod_base = OTHER; note = Nucleotide with phosphorothioate linkage
  modified_base 10: mod_base = OTHER; note = Nucleotide with phosphorothioate linkage
  modified_base 11: mod_base = OTHER; note = Nucleotide with phosphorothioate linkage
  modified_base 12: mod_base = OTHER; note = Nucleotide with phosphorothioate linkage
  modified_base 13: mod_base = OTHER; note = Nucleotide with phosphorothioate linkage
  modified_base 14: mod_base = OTHER; note = Nucleotide with phosphorothioate linkage
  modified_base 15: mod_base = OTHER; note = 5-methyl beta-D-oxy locked nucleotide with phosphorothioate linkage
  modified_base 16: mod_base = OTHER; note = 5-methyl beta-D-oxy locked nucleotide with phosphorothioate linkage
gctaaaccagtcatcc

SEQ ID NO: 394 - DNA, 17 bp, synthetic construct
  source 1..17: mol_type = other DNA
  modified_base 1: mod_base = OTHER; note = 5-methyl beta-D-oxy locked nucleotide with phosphorothioate linkage
  modified_base 2: mod_base = OTHER; note = beta-D-oxy locked nucleotide with phosphorothioate linkage
  modified_base 3: mod_base = OTHER; note = beta-D-oxy locked nucleotide with phosphorothioate linkage
  modified_base 4: mod_base = OTHER; note = beta-D-oxy locked nucleotide with phosphorothioate linkage
  modified_base 5: mod_base = OTHER; note = Nucleotide with phosphorothioate linkage
  modified_base 6: mod_base = OTHER; note = Nucleotide with phosphorothioate linkage
  modified_base 7: mod_base = OTHER; note = Nucleotide with phosphorothioate linkage
  modified_base 8: mod_base = OTHER; note = Nucleotide with phosphorothioate linkage
  modified_base 9: mod_base = OTHER; note = Nucleotide with phosphorothioate linkage
  modified_base 10: mod_base = OTHER; note = Nucleotide with phosphorothioate linkage
  modified_base 11: mod_base = OTHER; note = Nucleotide with phosphorothioate linkage
  modified_base 12: mod_base = OTHER; note = Nucleotide with phosphorothioate linkage
  modified_base 13: mod_base = OTHER; note = Nucleotide with phosphorothioate linkage
  modified_base 14: mod_base = OTHER; note = 5-methyl beta-D-oxy locked nucleotide with phosphorothioate linkage
  modified_base 15: mod_base = OTHER; note = beta-D-oxy locked nucleotide with phosphorothioate linkage
  modified_base 16: mod_base = OTHER; note = beta-D-oxy locked nucleotide with phosphorothioate linkage
  modified_base 17: mod_base = OTHER; note = beta-D-oxy locked nucleotide with phosphorothioate linkage
ctgttgattacttcaaa

SEQ ID NO: 395 - DNA, 16 bp, synthetic construct
  source 1..16: mol_type = other DNA
  modified_base 1: mod_base = OTHER; note = beta-D-oxy locked nucleotide with phosphorothioate linkage
  modified_base 2: mod_base = OTHER; note = beta-D-oxy locked nucleotide with phosphorothioate linkage
  modified_base 3: mod_base = OTHER; note = Nucleotide with phosphorothioate linkage
  modified_base 4: mod_base = OTHER; note = Nucleotide with phosphorothioate linkage
  modified_base 5: mod_base = OTHER; note = Nucleotide with phosphorothioate linkage
  modified_base 6: mod_base = OTHER; note = Nucleotide with phosphorothioate linkage
  modified_base 7: mod_base = OTHER; note = Nucleotide with phosphorothioate linkage
  modified_base 8: mod_base = OTHER; note = Nucleotide with phosphorothioate linkage
  modified_base 9: mod_base = OTHER; note = Nucleotide with phosphorothioate linkage
  modified_base 10: mod_base = OTHER; note = Nucleotide with phosphorothioate linkage
  modified_base 11: mod_base = OTHER; note = Nucleotide with phosphorothioate linkage
  modified_base 12: mod_base = OTHER; note = Nucleotide with phosphorothioate linkage
  modified_base 13: mod_base = OTHER; note = Nucleotide with phosphorothioate linkage
  modified_base 14: mod_base = OTHER; note = beta-D-oxy locked nucleotide with phosphorothioate linkage
  modified_base 15: mod_base = OTHER; note = 5-methyl beta-D-oxy locked nucleotide with phosphorothioate linkage
  modified_base 16: mod_base = OTHER; note = beta-D-oxy locked nucleotide with phosphorothioate linkage
tagtcgatcaccatca

SEQ ID NO: 396 - DNA, 16 bp, synthetic construct
  source 1..16: mol_type = other DNA
  modified_base 1: mod_base = OTHER; note = beta-D-oxy locked nucleotide with phosphorothioate linkage
  modified_base 2: mod_base = OTHER; note = beta-D-oxy locked nucleotide with phosphorothioate linkage
  modified_base 3: mod_base = OTHER; note = Nucleotide with phosphorothioate linkage
  modified_base 4: mod_base = OTHER; note = Nucleotide with phosphorothioate linkage
  modified_base 5: mod_base = OTHER; note = Nucleotide with phosphorothioate linkage
  modified_base 6: mod_base = OTHER; note = Nucleotide with phosphorothioate linkage
  modified_base 7: mod_base = OTHER; note = Nucleotide with phosphorothioate linkage
  modified_base 8: mod_base = OTHER; note = Nucleotide with phosphorothioate linkage
  modified_base 9: mod_base = OTHER; note = Nucleotide with phosphorothioate linkage
  modified_base 10: mod_base = OTHER; note = Nucleotide with phosphorothioate linkage
  modified_base 11: mod_base = OTHER; note = Nucleotide with phosphorothioate linkage
  modified_base 12: mod_base = OTHER; note = Nucleotide with phosphorothioate linkage
  modified_base 13: mod_base = OTHER; note = 5-methyl beta-D-oxy locked nucleotide with phosphorothioate linkage
  modified_base 14: mod_base = OTHER; note = beta-D-oxy locked nucleotide with phosphorothioate linkage
  modified_base 15: mod_base = OTHER; note = beta-D-oxy locked nucleotide with phosphorothioate linkage
  modified_base 16: mod_base = OTHER; note = 5-methyl beta-D-oxy locked nucleotide with phosphorothioate linkage
ttagtcgatcaccatc

SEQ ID NO: 397 - DNA, 15 bp, synthetic construct
  source 1..15: mol_type = other DNA
  modified_base 1: mod_base = OTHER; note = beta-D-oxy locked nucleotide with phosphorothioate linkage
  modified_base 2: mod_base = OTHER; note = beta-D-oxy locked nucleotide with phosphorothioate linkage
  modified_base 3: mod_base = OTHER; note = Nucleotide with phosphorothioate linkage
  modified_base 4: mod_base = OTHER; note = Nucleotide with phosphorothioate linkage
  modified_base 5: mod_base = OTHER; note = Nucleotide with phosphorothioate linkage
  modified_base 6: mod_base = OTHER; note = Nucleotide with phosphorothioate linkage
  modified_base 7: mod_base = OTHER; note = Nucleotide with phosphorothioate linkage
  modified_base 8: mod_base = OTHER; note = Nucleotide with phosphorothioate linkage
  modified_base 9: mod_base = OTHER; note = Nucleotide with phosphorothioate linkage
  modified_base 10: mod_base = OTHER; note = Nucleotide with phosphorothioate linkage
  modified_base 11: mod_base = OTHER; note = Nucleotide with phosphorothioate linkage
  modified_base 12: mod_base = OTHER; note = Nucleotide with phosphorothioate linkage
  modified_base 13: mod_base = OTHER; note = beta-D-oxy locked nucleotide with phosphorothioate linkage
  modified_base 14: mod_base = OTHER; note = beta-D-oxy locked nucleotide with phosphorothioate linkage
  modified_base 15: mod_base = OTHER; note = 5-methyl beta-D-oxy locked nucleotide with phosphorothioate linkage
tagtcgatcaccatc

SEQ ID NO: 398 - DNA, 15 bp, synthetic construct
  source 1..15: mol_type = other DNA
  modified_base 1: mod_base = OTHER; note = beta-D-oxy locked nucleotide with phosphorothioate linkage
  modified_base 2: mod_base = OTHER; note = beta-D-oxy locked nucleotide with phosphorothioate linkage
  modified_base 3: mod_base = OTHER; note = beta-D-oxy locked nucleotide with phosphorothioate linkage
  modified_base 4: mod_base = OTHER; note = Nucleotide with phosphorothioate linkage
  modified_base 5: mod_base = OTHER; note = Nucleotide with phosphorothioate linkage
  modified_base 6: mod_base = OTHER; note = Nucleotide with phosphorothioate linkage
  modified_base 7: mod_base = OTHER; note = Nucleotide with phosphorothioate linkage
  modified_base 8: mod_base = OTHER; note = Nucleotide with phosphorothioate linkage
  modified_base 9: mod_base = OTHER; note = Nucleotide with phosphorothioate linkage
  modified_base 10: mod_base = OTHER; note = Nucleotide with phosphorothioate linkage
  modified_base 11: mod_base = OTHER; note = Nucleotide with phosphorothioate linkage
  modified_base 12: mod_base = OTHER; note = 5-methyl beta-D-oxy locked nucleotide with phosphorothioate linkage
  modified_base 13: mod_base = OTHER; note = 5-methyl beta-D-oxy locked nucleotide with phosphorothioate linkage
  modified_base 14: mod_base = OTHER; note = beta-D-oxy locked nucleotide with phosphorothioate linkage
  modified_base 15: mod_base = OTHER; note = beta-D-oxy locked nucleotide with phosphorothioate linkage
ttagtcgatcaccat

SEQ ID NO: 399 - DNA, 17 bp, synthetic construct
  source 1..17: mol_type = other DNA
  modified_base 1: mod_base = OTHER; note = 5-methyl beta-D-oxy locked nucleotide with phosphorothioate linkage
  modified_base 2: mod_base = OTHER; note = beta-D-oxy locked nucleotide with phosphorothioate linkage
  modified_base 3: mod_base = OTHER; note = Nucleotide with phosphorothioate linkage
  modified_base 4: mod_base = OTHER; note = Nucleotide with phosphorothioate linkage
  modified_base 5: mod_base = OTHER; note = Nucleotide with phosphorothioate linkage
  modified_base 6: mod_base = OTHER; note = Nucleotide with phosphorothioate linkage
  modified_base 7: mod_base = OTHER; note = Nucleotide with phosphorothioate linkage
  modified_base 8: mod_base = OTHER; note = Nucleotide with phosphorothioate linkage
  modified_base 9: mod_base = OTHER; note = Nucleotide with phosphorothioate linkage
  modified_base 10: mod_base = OTHER; note = Nucleotide with phosphorothioate linkage
  modified_base 11: mod_base = OTHER; note = Nucleotide with phosphorothioate linkage
  modified_base 12: mod_base = OTHER; note = Nucleotide with phosphorothioate linkage
  modified_base 13: mod_base = OTHER; note = Nucleotide with phosphorothioate linkage
  modified_base 14: mod_base = OTHER; note = Nucleotide with phosphorothioate linkage
  modified_base 15: mod_base = OTHER; note = Nucleotide with phosphorothioate linkage
  modified_base 16: mod_base = OTHER; note = 5-methyl beta-D-oxy locked nucleotide with phosphorothioate linkage
  modified_base 17: mod_base = OTHER; note = beta-D-oxy locked nucleotide with phosphorothioate linkage
ctacgttcttaccctct

SEQ ID NO: 400 - DNA, 16 bp, synthetic construct
  source 1..16: mol_type = other DNA
  modified_base 1: mod_base = OTHER; note = beta-D-oxy locked nucleotide with phosphorothioate linkage
  modified_base 2: mod_base = OTHER; note = beta-D-oxy locked nucleotide with phosphorothioate linkage
  modified_base 3: mod_base = OTHER; note = Nucleotide with phosphorothioate linkage
  modified_base 4: mod_base = OTHER; note = Nucleotide with phosphorothioate linkage
  modified_base 5: mod_base = OTHER; note = Nucleotide with phosphorothioate linkage
  modified_base 6: mod_base = OTHER; note = Nucleotide with phosphorothioate linkage
  modified_base 7: mod_base = OTHER; note = Nucleotide with phosphorothioate linkage
  modified_base 8: mod_base = OTHER; note = Nucleotide with phosphorothioate linkage
  modified_base 9: mod_base = OTHER; note = Nucleotide with phosphorothioate linkage
  modified_base 10: mod_base = OTHER; note = Nucleotide with phosphorothioate linkage
  modified_base 11: mod_base = OTHER; note = Nucleotide with phosphorothioate linkage
  modified_base 12: mod_base = OTHER; note = Nucleotide with phosphorothioate linkage
  modified_base 13: mod_base = OTHER; note = Nucleotide with phosphorothioate linkage
  modified_base 14: mod_base = OTHER; note = beta-D-oxy locked nucleotide with phosphorothioate linkage
  modified_base 15: mod_base = OTHER; note = 5-methyl beta-D-oxy locked nucleotide with phosphorothioate linkage
  modified_base 16: mod_base = OTHER; note = beta-D-oxy locked nucleotide with phosphorothioate linkage
tacgttcttaccctct

SEQ ID NO: 401 - DNA, 18 bp, synthetic construct
  source 1..18: mol_type = other DNA
  modified_base 1: mod_base = OTHER; note = 5-methyl beta-D-oxy locked nucleotide with phosphorothioate linkage
  modified_base 2: mod_base = OTHER; note = beta-D-oxy locked nucleotide with phosphorothioate linkage
  modified_base 3: mod_base = OTHER; note = Nucleotide with phosphorothioate linkage
  modified_base 4: mod_base = OTHER; note = Nucleotide with phosphorothioate linkage
  modified_base 5: mod_base = OTHER; note = Nucleotide with phosphorothioate linkage
  modified_base 6: mod_base = OTHER; note = Nucleotide with phosphorothioate linkage
  modified_base 7: mod_base = OTHER; note = Nucleotide with phosphorothioate linkage
  modified_base 8: mod_base = OTHER; note = Nucleotide with phosphorothioate linkage
  modified_base 9: mod_base = OTHER; note = Nucleotide with phosphorothioate linkage
  modified_base 10: mod_base = OTHER; note = Nucleotide with phosphorothioate linkage
  modified_base 11: mod_base = OTHER; note = Nucleotide with phosphorothioate linkage
  modified_base 12: mod_base = OTHER; note = Nucleotide with phosphorothioate linkage
  modified_base 13: mod_base = OTHER; note = Nucleotide with phosphorothioate linkage
  modified_base 14: mod_base = OTHER; note = Nucleotide with phosphorothioate linkage
  modified_base 15: mod_base = OTHER; note = Nucleotide with phosphorothioate linkage
  modified_base 16: mod_base = OTHER; note = Nucleotide with phosphorothioate linkage
  modified_base 17: mod_base = OTHER; note = beta-D-oxy locked nucleotide with phosphorothioate linkage
  modified_base 18: mod_base = OTHER; note = 5-methyl beta-D-oxy locked nucleotide with phosphorothioate linkage
cactacgttcttaccctc

SEQ ID NO: 402 - DNA, 16 bp, synthetic construct
  source 1..16: mol_type = other DNA
  modified_base 1: mod_base = OTHER; note = 5-methyl beta-D-oxy locked nucleotide with phosphorothioate linkage
  modified_base 2: mod_base = OTHER; note = beta-D-oxy locked nucleotide with phosphorothioate linkage
  modified_base 3: mod_base = OTHER; note = Nucleotide with phosphorothioate linkage
  modified_base 4: mod_base = OTHER; note = Nucleotide with phosphorothioate linkage
  modified_base 5: mod_base = OTHER; note = Nucleotide with phosphorothioate linkage
  modified_base 6: mod_base = OTHER; note = Nucleotide with phosphorothioate linkage
  modified_base 7: mod_base = OTHER; note = Nucleotide with phosphorothioate linkage
  modified_base 8: mod_base = OTHER; note = Nucleotide with phosphorothioate linkage
  modified_base 9: mod_base = OTHER; note = Nucleotide with phosphorothioate linkage
  modified_base 10: mod_base = OTHER; note = Nucleotide with phosphorothioate linkage
  modified_base 11: mod_base = OTHER; note = Nucleotide with phosphorothioate linkage
  modified_base 12: mod_base = OTHER; note = Nucleotide with phosphorothioate linkage
  modified_base 13: mod_base = OTHER; note = Nucleotide with phosphorothioate linkage
  modified_base 14: mod_base = OTHER; note = Nucleotide with phosphorothioate linkage
  modified_base 15: mod_base = OTHER; note = beta-D-oxy locked nucleotide with phosphorothioate linkage
  modified_base 16: mod_base = OTHER; note = 5-methyl beta-D-oxy locked nucleotide with phosphorothioate linkage
ctacgttcttaccctc

SEQ ID NO: 403 - DNA, 17 bp, synthetic construct
  source 1..17: mol_type = other DNA
  modified_base 1: mod_base = OTHER; note = beta-D-oxy locked nucleotide with phosphorothioate linkage
  modified_base 2: mod_base = OTHER; note = 5-methyl beta-D-oxy locked nucleotide with phosphorothioate linkage
  modified_base 3: mod_base = OTHER; note = Nucleotide with phosphorothioate linkage
  modified_base 4: mod_base = OTHER; note = Nucleotide with phosphorothioate linkage
  modified_base 5: mod_base = OTHER; note = Nucleotide with phosphorothioate linkage
  modified_base 6: mod_base = OTHER; note = Nucleotide with phosphorothioate linkage
  modified_base 7: mod_base = OTHER; note = Nucleotide with phosphorothioate linkage
  modified_base 8: mod_base = OTHER; note = Nucleotide with phosphorothioate linkage
  modified_base 9: mod_base = OTHER; note = Nucleotide with phosphorothioate linkage
  modified_base 10: mod_base = OTHER; note = Nucleotide with phosphorothioate linkage
  modified_base 11: mod_base = OTHER; note = Nucleotide with phosphorothioate linkage
  modified_base 12: mod_base = OTHER; note = Nucleotide with phosphorothioate linkage
  modified_base 13: mod_base = OTHER; note = Nucleotide with phosphorothioate linkage
  modified_base 14: mod_base = OTHER; note = Nucleotide with phosphorothioate linkage
  modified_base 15: mod_base = OTHER; note = 5-methyl beta-D-oxy locked nucleotide with phosphorothioate linkage
  modified_base 16: mod_base = OTHER; note = beta-D-oxy locked nucleotide with phosphorothioate linkage
  modified_base 17: mod_base = OTHER; note = 5-methyl beta-D-oxy locked nucleotide with phosphorothioate linkage
actacgttcttaccctc

SEQ ID NO: 404 - DNA, 17 bp, synthetic construct
  source 1..17: mol_type = other DNA
  modified_base 1: mod_base = OTHER; note = 5-methyl beta-D-oxy locked nucleotide with phosphorothioate linkage
  modified_base 2: mod_base = OTHER; note = beta-D-oxy locked nucleotide with phosphorothioate linkage
  modified_base 3: mod_base = OTHER; note = Nucleotide with phosphorothioate linkage
  modified_base 4: mod_base = OTHER; note = Nucleotide with phosphorothioate linkage
  modified_base 5: mod_base = OTHER; note = Nucleotide with phosphorothioate linkage
  modified_base 6: mod_base = OTHER; note = Nucleotide with phosphorothioate linkage
  modified_base 7: mod_base = OTHER; note = Nucleotide with phosphorothioate linkage
  modified_base 8: mod_base = OTHER; note = Nucleotide with phosphorothioate linkage
  modified_base 9: mod_base = OTHER; note = Nucleotide with phosphorothioate linkage
  modified_base 10: mod_base = OTHER; note = Nucleotide with phosphorothioate linkage
  modified_base 11: mod_base = OTHER; note = Nucleotide with phosphorothioate linkage
  modified_base 12: mod_base = OTHER; note = Nucleotide with phosphorothioate linkage
  modified_base 13: mod_base = OTHER; note = Nucleotide with phosphorothioate linkage
  modified_base 14: mod_base = OTHER; note = Nucleotide with phosphorothioate linkage
  modified_base 15: mod_base = OTHER; note = Nucleotide with phosphorothioate linkage
  modified_base 16: mod_base = OTHER; note = 5-methyl beta-D-oxy locked nucleotide with phosphorothioate linkage
  modified_base 17: mod_base = OTHER; note = beta-D-oxy locked nucleotide with phosphorothioate linkage
cactacgttcttaccct

SEQ ID NO: 405 - DNA, 16 bp, synthetic construct
  source 1..16: mol_type = other DNA
  modified_base 1: mod_base = OTHER; note = beta-D-oxy locked nucleotide with phosphorothioate linkage
  modified_base 2: mod_base = OTHER; note = 5-methyl beta-D-oxy locked nucleotide with phosphorothioate linkage
  modified_base 3: mod_base = OTHER; note = Nucleotide with phosphorothioate linkage
  modified_base 4: mod_base = OTHER; note = Nucleotide with phosphorothioate linkage
  modified_base 5: mod_base = OTHER; note = Nucleotide with phosphorothioate linkage
  modified_base 6: mod_base = OTHER; note = Nucleotide with phosphorothioate linkage
  modified_base 7: mod_base = OTHER; note = Nucleotide with phosphorothioate linkage
  modified_base 8: mod_base = OTHER; note = Nucleotide with phosphorothioate linkage
  modified_base 9: mod_base = OTHER; note = Nucleotide with phosphorothioate linkage
  modified_base 10: mod_base = OTHER; note = Nucleotide with phosphorothioate linkage
  modified_base 11: mod_base = OTHER; note = Nucleotide with phosphorothioate linkage
  modified_base 12: mod_base = OTHER; note = Nucleotide with phosphorothioate linkage
  modified_base 13: mod_base = OTHER; note = Nucleotide with phosphorothioate linkage
  modified_base 14: mod_base = OTHER; note = Nucleotide with phosphorothioate linkage
  modified_base 15: mod_base = OTHER; note = 5-methyl beta-D-oxy locked nucleotide with phosphorothioate linkage
  modified_base 16: mod_base = OTHER; note = beta-D-oxy locked nucleotide with phosphorothioate linkage
actacgttcttaccct

SEQ ID NO: 406 - DNA, 15 bp, synthetic construct
  source 1..15: mol_type = other DNA
  modified_base 1: mod_base = OTHER; note = beta-D-oxy locked nucleotide with phosphorothioate linkage
  modified_base 2: mod_base = OTHER; note = 5-methyl beta-D-oxy locked nucleotide with phosphorothioate linkage
  modified_base 3: mod_base = OTHER; note = beta-D-oxy locked nucleotide with phosphorothioate linkage
  modified_base 4: mod_base = OTHER; note = Nucleotide with phosphorothioate linkage
  modified_base 5: mod_base = OTHER; note = Nucleotide with phosphorothioate linkage
  modified_base 6: mod_base = OTHER; note = Nucleotide with phosphorothioate linkage
  modified_base 7: mod_base = OTHER; note = Nucleotide with phosphorothioate linkage
  modified_base 8: mod_base = OTHER; note = Nucleotide with phosphorothioate linkage
  modified_base 9: mod_base = OTHER; note = Nucleotide with phosphorothioate linkage
  modified_base 10: mod_base = OTHER; note = Nucleotide with phosphorothioate linkage
  modified_base 11: mod_base = OTHER; note = Nucleotide with phosphorothioate linkage
  modified_base 12: mod_base = OTHER; note = Nucleotide with phosphorothioate linkage
  modified_base 13: mod_base = OTHER; note = Nucleotide with phosphorothioate linkage
  modified_base 14: mod_base = OTHER; note = 5-methyl beta-D-oxy locked nucleotide with phosphorothioate linkage
  modified_base 15: mod_base = OTHER; note = 5-methyl beta-D-oxy locked nucleotide with phosphorothioate linkage
actacgttcttaccc

SEQ ID NO: 407 - DNA, 17 bp, synthetic construct
  source 1..17: mol_type = other DNA
  modified_base 1: mod_base = OTHER; note = beta-D-oxy locked nucleotide with phosphorothioate linkage
  modified_base 2: mod_base = OTHER; note = 5-methyl beta-D-oxy locked nucleotide with phosphorothioate linkage
  modified_base 3: mod_base = OTHER; note = Nucleotide with phosphorothioate linkage
  modified_base 4: mod_base = OTHER; note = Nucleotide with phosphorothioate linkage
  modified_base 5: mod_base = OTHER; note = Nucleotide with phosphorothioate linkage
  modified_base 6: mod_base = OTHER; note = Nucleotide with phosphorothioate linkage
  modified_base 7: mod_base = OTHER; note = Nucleotide with phosphorothioate linkage
  modified_base 8: mod_base = OTHER; note = Nucleotide with phosphorothioate linkage
  modified_base 9: mod_base = OTHER; note = Nucleotide with phosphorothioate linkage
  modified_base 10: mod_base = OTHER; note = Nucleotide with phosphorothioate linkage
  modified_base 11: mod_base = OTHER; note = Nucleotide with phosphorothioate linkage
  modified_base 12: mod_base = OTHER; note = Nucleotide with phosphorothioate linkage
  modified_base 13: mod_base = OTHER; note = Nucleotide with phosphorothioate linkage
  modified_base 14: mod_base = OTHER; note = Nucleotide with phosphorothioate linkage
  modified_base 15: mod_base = OTHER; note = Nucleotide with phosphorothioate linkage
  modified_base 16: mod_base = OTHER; note = 5-methyl beta-D-oxy locked nucleotide with phosphorothioate linkage
  modified_base 17: mod_base = OTHER; note = 5-methyl beta-D-oxy locked nucleotide with phosphorothioate linkage
tcactacgttcttaccc

SEQ ID NO: 408 - DNA, 16 bp, synthetic construct
  source 1..16: mol_type = other DNA
  modified_base 1: mod_base = OTHER; note = 5-methyl beta-D-oxy locked nucleotide with phosphorothioate linkage
  modified_base 2: mod_base = OTHER; note = beta-D-oxy locked nucleotide with phosphorothioate linkage
  modified_base 3: mod_base = OTHER; note = 5-methyl beta-D-oxy locked nucleotide with phosphorothioate linkage
  modified_base 4: mod_base = OTHER; note = Nucleotide with phosphorothioate linkage
  modified_base 5: mod_base = OTHER; note = Nucleotide with phosphorothioate linkage
  modified_base 6: mod_base = OTHER; note = Nucleotide with phosphorothioate linkage
  modified_base 7: mod_base = OTHER; note = Nucleotide with phosphorothioate linkage
  modified_base 8: mod_base = OTHER; note = Nucleotide with phosphorothioate linkage
  modified_base 9: mod_base = OTHER; note = Nucleotide with phosphorothioate linkage
  modified_base 10: mod_base = OTHER; note = Nucleotide with phosphorothioate linkage
  modified_base 11: mod_base = OTHER; note = Nucleotide with phosphorothioate linkage
  modified_base 12: mod_base = OTHER; note = Nucleotide with phosphorothioate linkage
  modified_base 13: mod_base = OTHER; note = Nucleotide with phosphorothioate linkage
  modified_base 14: mod_base = OTHER; note = Nucleotide with phosphorothioate linkage
  modified_base 15: mod_base = OTHER; note = 5-methyl beta-D-oxy locked nucleotide with phosphorothioate linkage
  modified_base 16: mod_base = OTHER; note = 5-methyl beta-D-oxy locked nucleotide with phosphorothioate linkage
cactacgttcttaccc

SEQ ID NO: 409 - DNA, 16 bp, synthetic construct
  source 1..16: mol_type = other DNA
  modified_base 1: mod_base = OTHER; note = beta-D-oxy locked nucleotide with phosphorothioate linkage
  modified_base 2: mod_base = OTHER; note = 5-methyl beta-D-oxy locked nucleotide with phosphorothioate linkage
  modified_base 3: mod_base = OTHER; note = Nucleotide with phosphorothioate linkage
  modified_base 4: mod_base = OTHER; note = Nucleotide with phosphorothioate linkage
  modified_base 5: mod_base = OTHER; note = Nucleotide with phosphorothioate linkage
  modified_base 6: mod_base = OTHER; note = Nucleotide with phosphorothioate linkage
  modified_base 7: mod_base = OTHER; note = Nucleotide with phosphorothioate linkage
  modified_base 8: mod_base = OTHER; note = Nucleotide with phosphorothioate linkage
  modified_base 9: mod_base = OTHER; note = Nucleotide with phosphorothioate linkage
  modified_base 10: mod_base = OTHER; note = Nucleotide with phosphorothioate linkage
  modified_base 11: mod_base = OTHER; note = Nucleotide with phosphorothioate linkage
  modified_base 12: mod_base = OTHER; note = Nucleotide with phosphorothioate linkage
  modified_base 13: mod_base = OTHER; note = Nucleotide with phosphorothioate linkage
  modified_base 14: mod_base = OTHER; note = beta-D-oxy locked nucleotide with phosphorothioate linkage
  modified_base 15: mod_base = OTHER; note = 5-methyl beta-D-oxy locked nucleotide with phosphorothioate linkage
  modified_base 16: mod_base = OTHER; note = 5-methyl beta-D-oxy locked nucleotide with phosphorothioate linkage
tcactacgttcttacc

SEQ ID NO: 410 - DNA, 15 bp, synthetic construct
  source 1..15: mol_type = other DNA
  modified_base 1: mod_base = OTHER; note = 5-methyl beta-D-oxy locked nucleotide with phosphorothioate linkage
  modified_base 2: mod_base = OTHER; note = beta-D-oxy locked nucleotide with phosphorothioate linkage
  modified_base 3: mod_base = OTHER; note = Nucleotide with phosphorothioate linkage
  modified_base 4: mod_base = OTHER; note = Nucleotide with phosphorothioate linkage
  modified_base 5: mod_base = OTHER; note = Nucleotide with phosphorothioate linkage
  modified_base 6: mod_base = OTHER; note = Nucleotide with phosphorothioate linkage
  modified_base 7: mod_base = OTHER; note = Nucleotide with phosphorothioate linkage
  modified_base 8: mod_base = OTHER; note = Nucleotide with phosphorothioate linkage
  modified_base 9: mod_base = OTHER; note = Nucleotide with phosphorothioate linkage
  modified_base 10: mod_base = OTHER; note = Nucleotide with phosphorothioate linkage
  modified_base 11: mod_base = OTHER; note = Nucleotide with phosphorothioate linkage
  modified_base 12: mod_base = OTHER; note = Nucleotide with phosphorothioate linkage
  modified_base 13: mod_base = OTHER; note = Nucleotide with phosphorothioate linkage
  modified_base 14: mod_base = OTHER; note = 5-methyl beta-D-oxy locked nucleotide with phosphorothioate linkage
  modified_base 15: mod_base = OTHER; note = 5-methyl beta-D-oxy locked nucleotide with phosphorothioate linkage
cactacgttcttacc

SEQ ID NO: 411 - DNA, 17 bp, synthetic construct
  source 1..17: mol_type = other DNA
  modified_base 1: mod_base = OTHER; note = 5-methyl beta-D-oxy locked nucleotide with phosphorothioate linkage
  modified_base 2: mod_base = OTHER; note = beta-D-oxy locked nucleotide with phosphorothioate linkage
  modified_base 3: mod_base = OTHER; note = Nucleotide with phosphorothioate linkage
  modified_base 4: mod_base = OTHER; note = Nucleotide with phosphorothioate linkage
  modified_base 5: mod_base = OTHER; note = Nucleotide with phosphorothioate linkage
  modified_base 6: mod_base = OTHER; note = Nucleotide with phosphorothioate linkage
  modified_base 7: mod_base = OTHER; note = Nucleotide with phosphorothioate linkage
  modified_base 8: mod_base = OTHER; note = Nucleotide with phosphorothioate linkage
  modified_base 9: mod_base = OTHER; note = Nucleotide with phosphorothioate linkage
  modified_base 10: mod_base = OTHER; note = Nucleotide with phosphorothioate linkage
  modified_base 11: mod_base = OTHER; note = Nucleotide with phosphorothioate linkage
  modified_base 12: mod_base = OTHER; note = Nucleotide with phosphorothioate linkage
  modified_base 13: mod_base = OTHER; note = Nucleotide with phosphorothioate linkage
  modified_base 14: mod_base = OTHER; note = Nucleotide with phosphorothioate linkage
  modified_base 15: mod_base = OTHER; note = Nucleotide with phosphorothioate linkage
  modified_base 16: mod_base = OTHER; note = 5-methyl beta-D-oxy locked nucleotide with phosphorothioate linkage
  modified_base 17: mod_base = OTHER; note = 5-methyl beta-D-oxy locked nucleotide with phosphorothioate linkage
ctcactacgttcttacc

SEQ ID NO: 412 - DNA, 18 bp, synthetic construct
  source 1..18: mol_type = other DNA
  modified_base 1: mod_base = OTHER; note = 5-methyl beta-D-oxy locked nucleotide with phosphorothioate linkage
  modified_base 2: mod_base = OTHER; note = beta-D-oxy locked nucleotide with phosphorothioate linkage
  modified_base 3: mod_base = OTHER; note = 5-methyl beta-D-oxy locked nucleotide with phosphorothioate linkage
  modified_base 4: mod_base = OTHER; note = Nucleotide with phosphorothioate linkage
  modified_base 5: mod_base = OTHER; note = Nucleotide with phosphorothioate linkage
  modified_base 6: mod_base = OTHER; note = Nucleotide with phosphorothioate linkage
  modified_base 7: mod_base = OTHER; note = Nucleotide with phosphorothioate linkage
  modified_base 8: mod_base = OTHER; note = Nucleotide with phosphorothioate linkage
  modified_base 9: mod_base = OTHER; note = Nucleotide with phosphorothioate linkage
  modified_base 10: mod_base = OTHER; note = Nucleotide with phosphorothioate linkage
  modified_base 11: mod_base = OTHER; note = Nucleotide with phosphorothioate linkage
  modified_base 12: mod_base = OTHER; note = Nucleotide with phosphorothioate linkage
  modified_base 13: mod_base = OTHER; note = Nucleotide with phosphorothioate linkage
  modified_base 14: mod_base = OTHER; note = Nucleotide with phosphorothioate linkage
  modified_base 15: mod_base = OTHER; note = Nucleotide with phosphorothioate linkage
  modified_base 16: mod_base = OTHER; note = Nucleotide with phosphorothioate linkage
  modified_base 17: mod_base = OTHER; note = beta-D-oxy locked nucleotide with phosphorothioate linkage
  modified_base 18: mod_base = OTHER; note = 5-methyl beta-D-oxy locked nucleotide with phosphorothioate linkage
cactcactacgttcttac

SEQ ID NO: 413 - DNA, 17 bp, synthetic construct
  source 1..17: mol_type = other DNA
  modified_base 1: mod_base = OTHER; note = beta-D-oxy locked nucleotide with phosphorothioate linkage
  modified_base 2: mod_base = OTHER; note = 5-methyl beta-D-oxy locked nucleotide with phosphorothioate linkage
  modified_base 3: mod_base = OTHER; note = beta-D-oxy locked nucleotide with phosphorothioate linkage
  modified_base 4: mod_base = OTHER; note = 5-methyl beta-D-oxy locked nucleotide with phosphorothioate linkage
  modified_base 5: mod_base = OTHER; note = Nucleotide with phosphorothioate linkage
  modified_base 6: mod_base = OTHER; note = Nucleotide with phosphorothioate linkage
  modified_base 7: mod_base = OTHER; note = Nucleotide with phosphorothioate linkage
  modified_base 8: mod_base = OTHER; note = Nucleotide with phosphorothioate linkage
  modified_base 9: mod_base = OTHER; note = Nucleotide with phosphorothioate linkage
  modified_base 10: mod_base = OTHER; note = Nucleotide with phosphorothioate linkage
  modified_base 11: mod_base = OTHER; note = Nucleotide with phosphorothioate linkage
  modified_base 12: mod_base = OTHER; note = Nucleotide with phosphorothioate linkage
  modified_base 13: mod_base = OTHER; note = Nucleotide with phosphorothioate linkage
  modified_base 14: mod_base = OTHER; note = Nucleotide with phosphorothioate linkage
  modified_base 15: mod_base = OTHER; note = beta-D-oxy locked nucleotide with phosphorothioate linkage
  modified_base 16: mod_base = OTHER; note = beta-D-oxy locked nucleotide with phosphorothioate linkage
  modified_base 17: mod_base = OTHER; note = 5-methyl beta-D-oxy locked nucleotide with phosphorothioate linkage
actcactacgttcttac

SEQ ID NO: 414 - DNA, 15 bp, synthetic construct
  source 1..15: mol_type = other DNA
  modified_base 1: mod_base = OTHER; note = beta-D-oxy locked nucleotide with phosphorothioate linkage
  modified_base 2: mod_base = OTHER; note = 5-methyl beta-D-oxy locked nucleotide with phosphorothioate linkage
  modified_base 3: mod_base = OTHER; note = beta-D-oxy locked nucleotide with phosphorothioate linkage
  modified_base 4: mod_base = OTHER; note = Nucleotide with phosphorothioate linkage
  modified_base 5: mod_base = OTHER; note = Nucleotide with phosphorothioate linkage
  modified_base 6: mod_base = OTHER; note = Nucleotide with phosphorothioate linkage
  modified_base 7: mod_base = OTHER; note = Nucleotide with phosphorothioate linkage
  modified_base 8: mod_base = OTHER; note = Nucleotide with phosphorothioate linkage
  modified_base 9: mod_base = OTHER; note = Nucleotide with phosphorothioate linkage
  modified_base 10: mod_base = OTHER; note = Nucleotide with phosphorothioate linkage
  modified_base 11: mod_base = OTHER; note = Nucleotide with phosphorothioate linkage
  modified_base 12: mod_base = OTHER; note = Nucleotide with phosphorothioate linkage
  modified_base 13: mod_base = OTHER; note = beta-D-oxy locked nucleotide with phosphorothioate linkage
  modified_base 14: mod_base = OTHER; note = beta-D-oxy locked nucleotide with phosphorothioate linkage
  modified_base 15: mod_base = OTHER; note = 5-methyl beta-D-oxy locked nucleotide with phosphorothioate linkage
tcactacgttcttac

SEQ ID NO: 415 - DNA, 16 bp, synthetic construct
  source 1..16: mol_type = other DNA
  modified_base 1: mod_base = OTHER; note = 5-methyl beta-D-oxy locked nucleotide with phosphorothioate linkage
  modified_base 2: mod_base = OTHER; note = beta-D-oxy locked nucleotide with phosphorothioate linkage
  modified_base 3: mod_base = OTHER; note = 5-methyl beta-D-oxy locked nucleotide with phosphorothioate linkage
  modified_base 4: mod_base = OTHER; note = Nucleotide with phosphorothioate linkage
  modified_base 5: mod_base = OTHER; note = Nucleotide with phosphorothioate linkage
  modified_base 6: mod_base = OTHER; note = Nucleotide with phosphorothioate linkage
  modified_base 7: mod_base = OTHER; note = Nucleotide with phosphorothioate linkage
  modified_base 8: mod_base = OTHER; note = Nucleotide with phosphorothioate linkage
  modified_base 9: mod_base = OTHER; note = Nucleotide with phosphorothioate linkage
  modified_base 10: mod_base = OTHER; note = Nucleotide with phosphorothioate linkage
  modified_base 11: mod_base = OTHER; note = Nucleotide with phosphorothioate linkage
  modified_base 12: mod_base = OTHER; note = Nucleotide with phosphorothioate linkage
  modified_base 13: mod_base = OTHER; note = Nucleotide with phosphorothioate linkage
  modified_base 14: mod_base = OTHER; note = beta-D-oxy locked nucleotide with phosphorothioate linkage
  modified_base 15: mod_base = OTHER; note = beta-D-oxy locked nucleotide with phosphorothioate linkage
  modified_base 16: mod_base = OTHER; note = 5-methyl beta-D-oxy locked nucleotide with phosphorothioate linkage
ctcactacgttcttac

SEQ ID NO: 416 - DNA, 18 bp, synthetic construct
  source 1..18: mol_type = other DNA
  modified_base 1: mod_base = OTHER; note = 5-methyl beta-D-oxy locked nucleotide with phosphorothioate linkage
  modified_base 2: mod_base = OTHER; note = 5-methyl beta-D-oxy locked nucleotide with phosphorothioate linkage
  modified_base 3: mod_base = OTHER; note = Nucleotide with phosphorothioate linkage
  modified_base 4: mod_base = OTHER; note = Nucleotide with phosphorothioate linkage
  modified_base 5: mod_base = OTHER; note = Nucleotide with phosphorothioate linkage
  modified_base 6: mod_base = OTHER; note = Nucleotide with phosphorothioate linkage
  modified_base 7: mod_base = OTHER; note = Nucleotide with phosphorothioate linkage
  modified_base 8: mod_base = OTHER; note = Nucleotide with phosphorothioate linkage
  modified_base 9: mod_base = OTHER; note = Nucleotide with phosphorothioate linkage
  modified_base 10: mod_base = OTHER; note = Nucleotide with phosphorothioate linkage
  modified_base 11: mod_base = OTHER; note = Nucleotide with phosphorothioate linkage
  modified_base 12: mod_base = OTHER; note = Nucleotide with phosphorothioate linkage
  modified_base 13: mod_base = OTHER; note = Nucleotide with phosphorothioate linkage
  modified_base 14: mod_base = OTHER; note = Nucleotide with phosphorothioate linkage
  modified_base 15: mod_base = OTHER; note = Nucleotide with phosphorothioate linkage
  modified_base 16: mod_base = OTHER; note = Nucleotide with phosphorothioate linkage
  modified_base 17: mod_base = OTHER; note = beta-D-oxy locked nucleotide with phosphorothioate linkage
  modified_base 18: mod_base = OTHER; note = beta-D-oxy locked nucleotide with phosphorothioate linkage
ccactcactacgttctta

SEQ ID NO: 417 - DNA, 15 bp, synthetic construct
  source 1..15: mol_type = other DNA
  modified_base 1: mod_base = OTHER; note = 5-methyl beta-D-oxy locked nucleotide with phosphorothioate linkage
  modified_base 2: mod_base = OTHER; note = beta-D-oxy locked nucleotide with phosphorothioate linkage
  modified_base 3: mod_base = OTHER; note = 5-methyl beta-D-oxy locked nucleotide with phosphorothioate linkage
  modified_base 4: mod_base = OTHER; note = beta-D-oxy locked nucleotide with phosphorothioate linkage
  modified_base 5: mod_base = OTHER; note = Nucleotide with phosphorothioate linkage
  modified_base 6: mod_base = OTHER; note = Nucleotide with phosphorothioate linkage
  modified_base 7: mod_base = OTHER; note = Nucleotide with phosphorothioate linkage
  modified_base 8: mod_base = OTHER; note = Nucleotide with phosphorothioate linkage
  modified_base 9: mod_base = OTHER; note = Nucleotide with phosphorothioate linkage
  modified_base 10: mod_base = OTHER; note = Nucleotide with phosphorothioate linkage
  modified_base 11: mod_base = OTHER; note = Nucleotide with phosphorothioate linkage
  modified_base 12: mod_base = OTHER; note = 5-methyl beta-D-oxy locked nucleotide with phosphorothioate linkage
  modified_base 13: mod_base = OTHER; note = beta-D-oxy locked nucleotide with phosphorothioate linkage
  modified_base 14: mod_base = OTHER; note = beta-D-oxy locked nucleotide with phosphorothioate linkage
  modified_base 15: mod_base = OTHER; note = beta-D-oxy locked nucleotide with phosphorothioate linkage
ctcactacgttctta

SEQ ID NO: 418 - DNA, 16 bp, synthetic construct
  source 1..16: mol_type = other DNA
  modified_base 1: mod_base = OTHER; note = beta-D-oxy locked nucleotide with phosphorothioate linkage
  modified_base 2: mod_base = OTHER; note = 5-methyl beta-D-oxy locked nucleotide with phosphorothioate linkage
  modified_base 3: mod_base = OTHER; note = Nucleotide with phosphorothioate linkage
  modified_base 4: mod_base = OTHER; note = Nucleotide with phosphorothioate linkage
  modified_base 5: mod_base = OTHER; note = Nucleotide with phosphorothioate linkage
  modified_base 6: mod_base = OTHER; note = Nucleotide with phosphorothioate linkage
  modified_base 7: mod_base = OTHER; note = Nucleotide with phosphorothioate linkage
  modified_base 8: mod_base = OTHER; note = Nucleotide with phosphorothioate linkage
  modified_base 9: mod_base = OTHER; note = Nucleotide with phosphorothioate linkage
  modified_base 10: mod_base = OTHER; note = Nucleotide with phosphorothioate linkage
  modified_base 11: mod_base = OTHER; note = Nucleotide with phosphorothioate linkage
  modified_base 12: mod_base = OTHER; note = Nucleotide with phosphorothioate linkage
  modified_base 13: mod_base = OTHER; note = Nucleotide with phosphorothioate linkage
  modified_base 14: mod_base = OTHER; note = beta-D-oxy locked nucleotide with phosphorothioate linkage
  modified_base 15: mod_base = OTHER; note = beta-D-oxy locked nucleotide with phosphorothioate linkage
  modified_base 16: mod_base = OTHER; note = beta-D-oxy locked nucleotide with phosphorothioate linkage
actcactacgttctta

SEQ ID NO: 419 - DNA, 16 bp, synthetic construct
  source 1..16: mol_type = other DNA
  modified_base 1: mod_base = OTHER; note = 5-methyl beta-D-oxy locked nucleotide with phosphorothioate linkage
  modified_base 2: mod_base = OTHER; note = beta-D-oxy locked nucleotide with phosphorothioate linkage
  modified_base 3: mod_base = OTHER; note = Nucleotide with phosphorothioate linkage
  modified_base 4: mod_base = OTHER; note = Nucleotide with phosphorothioate linkage
  modified_base 5: mod_base = OTHER; note = Nucleotide with phosphorothioate linkage
  modified_base 6: mod_base = OTHER; note = Nucleotide with phosphorothioate linkage
  modified_base 7: mod_base = OTHER; note = Nucleotide with phosphorothioate linkage
  modified_base 8: mod_base = OTHER; note = Nucleotide with phosphorothioate linkage
  modified_base 9: mod_base = OTHER; note = Nucleotide with phosphorothioate linkage
  modified_base 10: mod_base = OTHER; note = Nucleotide with phosphorothioate linkage
  modified_base 11: mod_base = OTHER; note = Nucleotide with phosphorothioate linkage
  modified_base 12: mod_base = OTHER; note = Nucleotide with phosphorothioate linkage
  modified_base 13: mod_base = OTHER; note = beta-D-oxy locked nucleotide with phosphorothioate linkage
  modified_base 14: mod_base = OTHER; note = 5-methyl beta-D-oxy locked nucleotide with phosphorothioate linkage
  modified_base 15: mod_base = OTHER; note = beta-D-oxy locked nucleotide with phosphorothioate linkage
  modified_base 16: mod_base = OTHER; note = beta-D-oxy locked nucleotide with phosphorothioate linkage
cactcactacgttctt

SEQ ID NO: 420 - DNA, 16 bp, synthetic construct
  source 1..16: mol_type = other DNA
  modified_base 1: mod_base = OTHER; note = 5-methyl beta-D-oxy locked nucleotide with phosphorothioate linkage
  modified_base 2: mod_base = OTHER; note = 5-methyl beta-D-oxy locked nucleotide with phosphorothioate linkage
  modified_base 3: mod_base = OTHER; note = Nucleotide with phosphorothioate linkage
  modified_base 4: mod_base = OTHER; note = Nucleotide with phosphorothioate linkage
  modified_base 5: mod_base = OTHER; note = Nucleotide with phosphorothioate linkage
  modified_base 6: mod_base = OTHER; note = Nucleotide with phosphorothioate linkage
  modified_base 7: mod_base = OTHER; note = Nucleotide with phosphorothioate linkage
  modified_base 8: mod_base = OTHER; note = Nucleotide with phosphorothioate linkage
  modified_base 9: mod_base = OTHER; note = Nucleotide with phosphorothioate linkage
  modified_base 10: mod_base = OTHER; note = Nucleotide with phosphorothioate linkage
  modified_base 11: mod_base = OTHER; note = Nucleotide with phosphorothioate linkage
  modified_base 12: mod_base = OTHER; note = Nucleotide with phosphorothioate linkage
  modified_base 13: mod_base = OTHER; note = Nucleotide with phosphorothioate linkage
  modified_base 14: mod_base = OTHER; note = beta-D-oxy locked nucleotide with phosphorothioate linkage
  modified_base 15: mod_base = OTHER; note = 5-methyl beta-D-oxy locked nucleotide with phosphorothioate linkage
  modified_base 16: mod_base = OTHER; note = beta-D-oxy locked nucleotide with phosphorothioate linkage
ccactcactacgttct

SEQ ID NO: 421 - DNA, 16 bp, synthetic construct
  source 1..16: mol_type = other DNA
  modified_base 1: mod_base = OTHER; note = 5-methyl beta-D-oxy locked nucleotide with phosphorothioate linkage
  modified_base 2: mod_base = OTHER; note = 5-methyl beta-D-oxy locked nucleotide with phosphorothioate linkage
  modified_base 3: mod_base = OTHER; note = Nucleotide with phosphorothioate linkage
  modified_base 4: mod_base = OTHER; note = Nucleotide with phosphorothioate linkage
  modified_base 5: mod_base = OTHER; note = Nucleotide with phosphorothioate linkage
  modified_base 6: mod_base = OTHER; note = Nucleotide with phosphorothioate linkage
  modified_base 7: mod_base = OTHER; note = Nucleotide with phosphorothioate linkage
  modified_base 8: mod_base = OTHER; note = Nucleotide with phosphorothioate linkage
  modified_base 9: mod_base = OTHER; note = Nucleotide with phosphorothioate linkage
  modified_base 10: mod_base = OTHER; note = Nucleotide with phosphorothioate linkage
  modified_base 11: mod_base = OTHER; note = Nucleotide with phosphorothioate linkage
  modified_base 12: mod_base = OTHER; note = Nucleotide with phosphorothioate linkage
  modified_base 13: mod_base = OTHER; note = Nucleotide with phosphorothioate linkage
  modified_base 14: mod_base = OTHER; note = Nucleotide with phosphorothioate linkage
  modified_base 15: mod_base = OTHER; note = beta-D-oxy locked nucleotide with phosphorothioate linkage
  modified_base 16: mod_base = OTHER; note = 5-methyl beta-D-oxy locked nucleotide with phosphorothioate linkage
cccactcactacgttc

SEQ ID NO: 422 - DNA, 15 bp, synthetic construct
  source 1..15: mol_type = other DNA
  modified_base 1: mod_base = OTHER; note = 5-methyl beta-D-oxy locked nucleotide with phosphorothioate linkage
  modified_base 2: mod_base = OTHER; note = 5-methyl beta-D-oxy locked nucleotide with phosphorothioate linkage
  modified_base 3: mod_base = OTHER; note = beta-D-oxy locked nucleotide with phosphorothioate linkage
  modified_base 4: mod_base = OTHER; note = 5-methyl beta-D-oxy locked nucleotide with phosphorothioate linkage
  modified_base 5: mod_base = OTHER; note = Nucleotide with phosphorothioate linkage
  modified_base 6: mod_base = OTHER; note = Nucleotide with phosphorothioate linkage
  modified_base 7: mod_base = OTHER; note = Nucleotide with phosphorothioate linkage
  modified_base 8: mod_base = OTHER; note = Nucleotide with phosphorothioate linkage
  modified_base 9: mod_base = OTHER; note = Nucleotide with phosphorothioate linkage
  modified_base 10: mod_base = OTHER; note = Nucleotide with phosphorothioate linkage
  modified_base 11: mod_base = OTHER; note = Nucleotide with phosphorothioate linkage
  modified_base 12: mod_base = OTHER; note = Nucleotide with phosphorothioate linkage
  modified_base 13: mod_base = OTHER; note = Nucleotide with phosphorothioate linkage
  modified_base 14: mod_base = OTHER; note = beta-D-oxy locked nucleotide with phosphorothioate linkage
  modified_base 15: mod_base = OTHER; note = 5-methyl beta-D-oxy locked nucleotide with phosphorothioate linkage
ccactcactacgttc

SEQ ID NO: 423 - DNA, 15 bp, synthetic construct
  source 1..15: mol_type = other DNA
  modified_base 1: mod_base = OTHER; note = 5-methyl beta-D-oxy locked nucleotide with phosphorothioate linkage
  modified_base 2: mod_base = OTHER; note = 5-methyl beta-D-oxy locked nucleotide with phosphorothioate linkage
  modified_base 3: mod_base = OTHER; note = Nucleotide with phosphorothioate linkage
  modified_base 4: mod_base = OTHER; note = Nucleotide with phosphorothioate linkage
  modified_base 5: mod_base = OTHER; note = Nucleotide with phosphorothioate linkage
  modified_base 6: mod_base = OTHER; note = Nucleotide with phosphorothioate linkage
  modified_base 7: mod_base = OTHER; note = Nucleotide with phosphorothioate linkage
  modified_base 8: mod_base = OTHER; note = Nucleotide with phosphorothioate linkage
  modified_base 9: mod_base = OTHER; note = Nucleotide with phosphorothioate linkage
  modified_base 10: mod_base = OTHER; note = Nucleotide with phosphorothioate linkage
  modified_base 11: mod_base = OTHER; note = Nucleotide with phosphorothioate linkage
  modified_base 12: mod_base = OTHER; note = Nucleotide with phosphorothioate linkage
  modified_base 13: mod_base = OTHER; note = Nucleotide with phosphorothioate linkage
  modified_base 14: mod_base = OTHER; note = beta-D-oxy locked nucleotide with phosphorothioate linkage
  modified_base 15: mod_base = OTHER; note = beta-D-oxy locked nucleotide with phosphorothioate linkage
cccactcactacgtt

SEQ ID NO: 424 - DNA, 18 bp, synthetic construct
  source 1..18: mol_type = other DNA
  modified_base 1: mod_base = OTHER; note = beta-D-oxy locked nucleotide with phosphorothioate linkage
  modified_base 2: mod_base = OTHER; note = beta-D-oxy locked nucleotide with phosphorothioate linkage
  modified_base 3: mod_base = OTHER; note = beta-D-oxy locked nucleotide with phosphorothioate linkage
  modified_base 4: mod_base = OTHER; note = Nucleotide with phosphorothioate linkage
  modified_base 5: mod_base = OTHER; note = Nucleotide with phosphorothioate linkage
  modified_base 6: mod_base = OTHER; note = Nucleotide with phosphorothioate linkage
  modified_base 7: mod_base = OTHER; note = Nucleotide with phosphorothioate linkage
  modified_base 8: mod_base = OTHER; note = Nucleotide with phosphorothioate linkage
  modified_base 9: mod_base = OTHER; note = Nucleotide with phosphorothioate linkage
  modified_base 10: mod_base = OTHER; note = Nucleotide with phosphorothioate linkage
  modified_base 11: mod_base = OTHER; note = Nucleotide with phosphorothioate linkage
  modified_base 12: mod_base = OTHER; note = Nucleotide with phosphorothioate linkage
  modified_base 13: mod_base = OTHER; note = Nucleotide with phosphorothioate linkage
  modified_base 14: mod_base = OTHER; note = Nucleotide with phosphorothioate linkage
  modified_base 15: mod_base = OTHER; note = beta-D-oxy locked nucleotide with phosphorothioate linkage
  modified_base 16: mod_base = OTHER; note = beta-D-oxy locked nucleotide with phosphorothioate linkage
  modified_base 17: mod_base = OTHER; note = beta-D-oxy locked nucleotide with phosphorothioate linkage
  modified_base 18: mod_base = OTHER; note = beta-D-oxy locked nucleotide with phosphorothioate linkage
agttaacatttctctttt

SEQ ID NO: 425 - DNA, 18 bp, synthetic construct
  source 1..18: mol_type = other DNA
  modified_base 1: mod_base = OTHER; note = beta-D-oxy locked nucleotide with phosphorothioate linkage
  modified_base 2: mod_base = OTHER; note = beta-D-oxy locked nucleotide with phosphorothioate linkage
  modified_base 3: mod_base = OTHER; note = beta-D-oxy locked nucleotide with phosphorothioate linkage
  modified_base 4: mod_base = OTHER; note = beta-D-oxy locked nucleotide with phosphorothioate linkage
  modified_base 5: mod_base = OTHER; note = Nucleotide with phosphorothioate linkage
  modified_base 6: mod_base = OTHER; note = Nucleotide with phosphorothioate linkage
  modified_base 7: mod_base = OTHER; note = Nucleotide with phosphorothioate linkage
  modified_base 8: mod_base = OTHER; note = Nucleotide with phosphorothioate linkage
  modified_base 9: mod_base = OTHER; note = Nucleotide with phosphorothioate linkage
  modified_base 10: mod_base = OTHER; note = Nucleotide with phosphorothioate linkage
  modified_base 11: mod_base = OTHER; note = Nucleotide with phosphorothioate linkage
  modified_base 12: mod_base = OTHER; note = Nucleotide with phosphorothioate linkage
  modified_base 13: mod_base = OTHER; note = Nucleotide with phosphorothioate linkage
  modified_base 14: mod_base = OTHER; note = Nucleotide with phosphorothioate linkage
  modified_base 15: mod_base = OTHER; note = 5-methyl beta-D-oxy locked nucleotide with phosphorothioate linkage
  modified_base 16: mod_base = OTHER; note = beta-D-oxy locked nucleotide with phosphorothioate linkage
  modified_base 17: mod_base = OTHER; note = beta-D-oxy locked nucleotide with phosphorothioate linkage
  modified_base 18: mod_base = OTHER; note = beta-D-oxy locked nucleotide with phosphorothioate linkage
aagttaacatttctcttt

SEQ ID NO: 426 - DNA, 18 bp, synthetic construct
  source 1..18: mol_type = other DNA
  modified_base 1: mod_base = OTHER; note = 5-methyl beta-D-oxy locked nucleotide with phosphorothioate linkage
  modified_base 2: mod_base = OTHER; note = beta-D-oxy locked nucleotide with phosphorothioate linkage
  modified_base 3: mod_base = OTHER; note = Nucleotide with phosphorothioate linkage
  modified_base 4: mod_base = OTHER; note = Nucleotide with phosphorothioate linkage
  modified_base 5: mod_base = OTHER; note = Nucleotide with phosphorothioate linkage
  modified_base 6: mod_base = OTHER; note = Nucleotide with phosphorothioate linkage
  modified_base 7: mod_base = OTHER; note = Nucleotide with phosphorothioate linkage
  modified_base 8: mod_base = OTHER; note = Nucleotide with phosphorothioate linkage
  modified_base 9: mod_base = OTHER; note = Nucleotide with phosphorothioate linkage
  modified_base 10: mod_base = OTHER; note = Nucleotide with phosphorothioate linkage
  modified_base 11: mod_base = OTHER; note = Nucleotide with phosphorothioate linkage
  modified_base 12: mod_base = OTHER; note = Nucleotide with phosphorothioate linkage
  modified_base 13: mod_base = OTHER; note = Nucleotide with phosphorothioate linkage
  modified_base 14: mod_base = OTHER; note = Nucleotide with phosphorothioate linkage
  modified_base 15: mod_base = OTHER; note = Nucleotide with phosphorothioate linkage
  modified_base 16: mod_base = OTHER; note = Nucleotide with phosphorothioate linkage
  modified_base 17: mod_base = OTHER; note = 5-methyl beta-D-oxy locked nucleotide with phosphorothioate linkage
  modified_base 18: mod_base = OTHER; note = beta-D-oxy locked nucleotide with phosphorothioate linkage
caacatacacttctcact

SEQ ID NO: 427 - DNA, 20 bp, synthetic construct
  source 1..20: mol_type = other DNA
  modified_base 1: mod_base = OTHER; note = 5-methyl beta-D-oxy locked nucleotide with phosphorothioate linkage
  modified_base 2: mod_base = OTHER; note = beta-D-oxy locked nucleotide with phosphorothioate linkage
  modified_base 3: mod_base = OTHER; note = Nucleotide with phosphorothioate linkage
  modified_base 4: mod_base = OTHER; note = Nucleotide with phosphorothioate linkage
  modified_base 5: mod_base = OTHER; note = Nucleotide with phosphorothioate linkage
  modified_base 6: mod_base = OTHER; note = Nucleotide with phosphorothioate linkage
  modified_base 7: mod_base = OTHER; note = Nucleotide with phosphorothioate linkage
  modified_base 8: mod_base = OTHER; note = Nucleotide with phosphorothioate linkage
  modified_base 9: mod_base = OTHER; note = Nucleotide with phosphorothioate linkage
  modified_base 10: mod_base = OTHER; note = Nucleotide with phosphorothioate linkage
  modified_base 11: mod_base = OTHER; note = Nucleotide with phosphorothioate linkage
  modified_base 12: mod_base = OTHER; note = Nucleotide with phosphorothioate linkage
  modified_base 13: mod_base = OTHER; note = Nucleotide with phosphorothioate linkage
  modified_base 14: mod_base = OTHER; note = Nucleotide with phosphorothioate linkage
  modified_base 15: mod_base = OTHER; note = Nucleotide with phosphorothioate linkage
  modified_base 16: mod_base = OTHER; note = Nucleotide with phosphorothioate linkage
  modified_base 17: mod_base = OTHER; note = Nucleotide with phosphorothioate linkage
  modified_base 18: mod_base = OTHER; note = Nucleotide with phosphorothioate linkage
  modified_base 19: mod_base = OTHER; note = 5-methyl beta-D-oxy locked nucleotide with phosphorothioate linkage
  modified_base 20: mod_base = OTHER; note = beta-D-oxy locked nucleotide with phosphorothioate linkage
cacaacatacacttctcact

SEQ ID NO: 428 - DNA, 17 bp, synthetic construct
  source 1..17: mol_type = other DNA
  modified_base 1: mod_base = OTHER; note = beta-D-oxy locked nucleotide with phosphorothioate linkage
  modified_base 2: mod_base = OTHER; note = beta-D-oxy locked nucleotide with phosphorothioate linkage
  modified_base 3: mod_base = OTHER; note = 5-methyl beta-D-oxy locked nucleotide with phosphorothioate linkage
  modified_base 4: mod_base = OTHER; note = Nucleotide with phosphorothioate linkage
  modified_base 5: mod_base = OTHER; note = Nucleotide with phosphorothioate linkage
  modified_base 6: mod_base = OTHER; note = Nucleotide with phosphorothioate linkage
  modified_base 7: mod_base = OTHER; note = Nucleotide with phosphorothioate linkage
  modified_base 8: mod_base = OTHER; note = Nucleotide with phosphorothioate linkage
  modified_base 9: mod_base = OTHER; note = Nucleotide with phosphorothioate linkage
  modified_base 10: mod_base = OTHER; note = Nucleotide with phosphorothioate linkage
  modified_base 11: mod_base = OTHER; note = Nucleotide with phosphorothioate linkage
  modified_base 12: mod_base = OTHER; note = Nucleotide with phosphorothioate linkage
  modified_base 13: mod_base = OTHER; note = Nucleotide with phosphorothioate linkage
  modified_base 14: mod_base = OTHER; note = 5-methyl beta-D-oxy locked nucleotide with phosphorothioate linkage
  modified_base 15: mod_base = OTHER; note = beta-D-oxy locked nucleotide with phosphorothioate linkage
  modified_base 16: mod_base = OTHER; note = 5-methyl beta-D-oxy locked nucleotide with phosphorothioate linkage
  modified_base 17: mod_base = OTHER; note = beta-D-oxy locked nucleotide with phosphorothioate linkage
aacatacacttctcact

SEQ ID NO: 429 - DNA, 19 bp, synthetic construct
  source 1..19: mol_type = other DNA
  modified_base 1: mod_base = OTHER; note = beta-D-oxy locked nucleotide with phosphorothioate linkage
  modified_base 2: mod_base = OTHER; note = 5-methyl beta-D-oxy locked nucleotide with phosphorothioate linkage
  modified_base 3: mod_base = OTHER; note = Nucleotide with phosphorothioate linkage
  modified_base 4: mod_base = OTHER; note = Nucleotide with phosphorothioate linkage
  modified_base 5: mod_base = OTHER; note = Nucleotide with phosphorothioate linkage
  modified_base 6: mod_base = OTHER; note = Nucleotide with phosphorothioate linkage
  modified_base 7: mod_base = OTHER; note = Nucleotide with phosphorothioate linkage
  modified_base 8: mod_base = OTHER; note = Nucleotide with phosphorothioate linkage
  modified_base 9: mod_base = OTHER; note = Nucleotide with phosphorothioate linkage
  modified_base 10: mod_base = OTHER; note = Nucleotide with phosphorothioate linkage
  modified_base 11: mod_base = OTHER; note = Nucleotide with phosphorothioate linkage
  modified_base 12: mod_base = OTHER; note = Nucleotide with phosphorothioate linkage
  modified_base 13: mod_base = OTHER; note = Nucleotide with phosphorothioate linkage
  modified_base 14: mod_base = OTHER; note = Nucleotide with phosphorothioate linkage
  modified_base 15: mod_base = OTHER; note = Nucleotide with phosphorothioate linkage
  modified_base 16: mod_base = OTHER; note = Nucleotide with phosphorothioate linkage
  modified_base 17: mod_base = OTHER; note = Nucleotide with phosphorothioate linkage
  modified_base 18: mod_base = OTHER; note = 5-methyl beta-D-oxy locked nucleotide with phosphorothioate linkage
  modified_base 19: mod_base = OTHER; note = beta-D-oxy locked nucleotide with phosphorothioate linkage
acaacatacacttctcact

SEQ ID NO: 430 - DNA, 20 bp, synthetic construct
  source 1..20: mol_type = other DNA
  modified_base 1: mod_base = OTHER; note = 5-methyl beta-D-oxy locked nucleotide with phosphorothioate linkage
  modified_base 2: mod_base = OTHER; note = 5-methyl beta-D-oxy locked nucleotide with phosphorothioate linkage
  modified_base 3: mod_base = OTHER; note = Nucleotide with phosphorothioate linkage
  modified_base 4: mod_base = OTHER; note = Nucleotide with phosphorothioate linkage
  modified_base 5: mod_base = OTHER; note = Nucleotide with phosphorothioate linkage
  modified_base 6: mod_base = OTHER; note = Nucleotide with phosphorothioate linkage
  modified_base 7: mod_base = OTHER; note = Nucleotide with phosphorothioate linkage
  modified_base 8: mod_base = OTHER; note = Nucleotide with phosphorothioate linkage
  modified_base 9: mod_base = OTHER; note = Nucleotide with phosphorothioate linkage
  modified_base 10: mod_base = OTHER; note = Nucleotide with phosphorothioate linkage
  modified_base 11: mod_base = OTHER; note = Nucleotide with phosphorothioate linkage
  modified_base 12: mod_base = OTHER; note = Nucleotide with phosphorothioate linkage
  modified_base 13: mod_base = OTHER; note = Nucleotide with phosphorothioate linkage
  modified_base 14: mod_base = OTHER; note = Nucleotide with phosphorothioate linkage
  modified_base 15: mod_base = OTHER; note = Nucleotide with phosphorothioate linkage
  modified_base 16: mod_base = OTHER; note = Nucleotide with phosphorothioate linkage
  modified_base 17: mod_base = OTHER; note = Nucleotide with phosphorothioate linkage
  modified_base 18: mod_base = OTHER; note = Nucleotide with phosphorothioate linkage
  modified_base 19: mod_base = OTHER; note = beta-D-oxy locked nucleotide with phosphorothioate linkage
  modified_base 20: mod_base = OTHER; note = 5-methyl beta-D-oxy locked nucleotide with phosphorothioate linkage
ccacaacatacacttctcac

SEQ ID NO: 431 - DNA, 19 bp, synthetic construct
  source 1..19: mol_type = other DNA
  modified_base 1: mod_base = OTHER; note = 5-methyl beta-D-oxy locked nucleotide with phosphorothioate linkage
  modified_base 2: mod_base = OTHER; note = beta-D-oxy locked nucleotide with phosphorothioate linkage
  modified_base 3: mod_base = OTHER; note = Nucleotide with phosphorothioate linkage
  modified_base 4: mod_base = OTHER; note = Nucleotide with phosphorothioate linkage
  modified_base 5: mod_base = OTHER; note = Nucleotide with phosphorothioate linkage
  modified_base 6: mod_base = OTHER; note = Nucleotide with phosphorothioate linkage
  modified_base 7: mod_base = OTHER; note = Nucleotide with phosphorothioate linkage
  modified_base 8: mod_base = OTHER; note = Nucleotide with phosphorothioate linkage
  modified_base 9: mod_base = OTHER; note = Nucleotide with phosphorothioate linkage
  modified_base 10: mod_base = OTHER; note = Nucleotide with phosphorothioate linkage
  modified_base 11: mod_base = OTHER; note = Nucleotide with phosphorothioate linkage
  modified_base 12: mod_base = OTHER; note = Nucleotide with phosphorothioate linkage
  modified_base 13: mod_base = OTHER; note = Nucleotide with phosphorothioate linkage
  modified_base 14: mod_base = OTHER; note = Nucleotide with phosphorothioate linkage
  modified_base 15: mod_base = OTHER; note = Nucleotide with phosphorothioate linkage
  modified_base 16: mod_base = OTHER; note = Nucleotide with phosphorothioate linkage
  modified_base 17: mod_base = OTHER; note = Nucleotide with phosphorothioate linkage
  modified_base 18: mod_base = OTHER; note = beta-D-oxy locked nucleotide with phosphorothioate linkage
  modified_base 19: mod_base = OTHER; note = 5-methyl beta-D-oxy locked nucleotide with phosphorothioate linkage
cacaacatacacttctcac

SEQ ID NO: 432 - DNA, 18 bp, synthetic construct
  source 1..18: mol_type = other DNA
  modified_base 1: mod_base = OTHER; note = 5-methyl beta-D-oxy locked nucleotide with phosphorothioate linkage
  modified_base 2: mod_base = OTHER; note = beta-D-oxy locked nucleotide with phosphorothioate linkage
  modified_base 3: mod_base = OTHER; note = 5-methyl beta-D-oxy locked nucleotide with phosphorothioate linkage
  modified_base 4: mod_base = OTHER; note = Nucleotide with phosphorothioate linkage
  modified_base 5: mod_base = OTHER; note = Nucleotide with phosphorothioate linkage
  modified_base 6: mod_base = OTHER; note = Nucleotide with phosphorothioate linkage
  modified_base 7: mod_base = OTHER; note = Nucleotide with phosphorothioate linkage
  modified_base 8: mod_base = OTHER; note = Nucleotide with phosphorothioate linkage
  modified_base 9: mod_base = OTHER; note = Nucleotide with phosphorothioate linkage
  modified_base 10: mod_base = OTHER; note = Nucleotide with phosphorothioate linkage
  modified_base 11: mod_base = OTHER; note = Nucleotide with phosphorothioate linkage
  modified_base 12: mod_base = OTHER; note = Nucleotide with phosphorothioate linkage
  modified_base 13: mod_base = OTHER; note = Nucleotide with phosphorothioate linkage
  modified_base 14: mod_base = OTHER; note = Nucleotide with phosphorothioate linkage
  modified_base 15: mod_base = OTHER; note = Nucleotide with phosphorothioate linkage
  modified_base 16: mod_base = OTHER; note = Nucleotide with phosphorothioate linkage
  modified_base 17: mod_base = OTHER; note = 5-methyl beta-D-oxy locked nucleotide with phosphorothioate linkage
  modified_base 18: mod_base = OTHER; note = beta-D-oxy locked nucleotide with phosphorothioate linkage
cacaacatacacttctca

SEQ ID NO: 433 - DNA, 19 bp, synthetic construct
  source 1..19: mol_type = other DNA
  modified_base 1: mod_base = OTHER; note = 5-methyl beta-D-oxy locked nucleotide with phosphorothioate linkage
  modified_base 2: mod_base = OTHER; note = 5-methyl beta-D-oxy locked nucleotide with phosphorothioate linkage
  modified_base 3: mod_base = OTHER; note = Nucleotide with phosphorothioate linkage
  modified_base 4: mod_base = OTHER; note = Nucleotide with phosphorothioate linkage
  modified_base 5: mod_base = OTHER; note = Nucleotide with phosphorothioate linkage
  modified_base 6: mod_base = OTHER; note = Nucleotide with phosphorothioate linkage
  modified_base 7: mod_base = OTHER; note = Nucleotide with phosphorothioate linkage
  modified_base 8: mod_base = OTHER; note = Nucleotide with phosphorothioate linkage
  modified_base 9: mod_base = OTHER; note = Nucleotide with phosphorothioate linkage
  modified_base 10: mod_base = OTHER; note = Nucleotide with phosphorothioate linkage
  modified_base 11: mod_base = OTHER; note = Nucleotide with phosphorothioate linkage
  modified_base 12: mod_base = OTHER; note = Nucleotide with phosphorothioate linkage
  modified_base 13: mod_base = OTHER; note = Nucleotide with phosphorothioate linkage
  modified_base 14: mod_base = OTHER; note = Nucleotide with phosphorothioate linkage
  modified_base 15: mod_base = OTHER; note = Nucleotide with phosphorothioate linkage
  modified_base 16: mod_base = OTHER; note = Nucleotide with phosphorothioate linkage
  modified_base 17: mod_base = OTHER; note = Nucleotide with phosphorothioate linkage
  modified_base 18: mod_base = OTHER; note = 5-methyl beta-D-oxy locked nucleotide with phosphorothioate linkage
  modified_base 19: mod_base = OTHER; note = beta-D-oxy locked nucleotide with phosphorothioate linkage
ccacaacatacacttctca

SEQ ID NO: 434 - DNA, 17 bp, synthetic construct
  source 1..17: mol_type = other DNA
  modified_base 1: mod_base = OTHER; note = 5-methyl beta-D-oxy locked nucleotide with phosphorothioate linkage
  modified_base 2: mod_base = OTHER; note = beta-D-oxy locked nucleotide with phosphorothioate linkage
  modified_base 3: mod_base = OTHER; note = 5-methyl beta-D-oxy locked nucleotide with phosphorothioate linkage
  modified_base 4: mod_base = OTHER; note = beta-D-oxy locked nucleotide with phosphorothioate linkage
  modified_base 5: mod_base = OTHER; note = Nucleotide with phosphorothioate linkage
  modified_base 6: mod_base = OTHER; note = Nucleotide with phosphorothioate linkage
  modified_base 7: mod_base = OTHER; note = Nucleotide with phosphorothioate linkage
  modified_base 8: mod_base = OTHER; note = Nucleotide with phosphorothioate linkage
  modified_base 9: mod_base = OTHER; note = Nucleotide with phosphorothioate linkage
  modified_base 10: mod_base = OTHER; note = Nucleotide with phosphorothioate linkage
  modified_base 11: mod_base = OTHER; note = Nucleotide with phosphorothioate linkage
  modified_base 12: mod_base = OTHER; note = Nucleotide with phosphorothioate linkage
  modified_base 13: mod_base = OTHER; note = Nucleotide with phosphorothioate linkage
  modified_base 14: mod_base = OTHER; note = beta-D-oxy locked nucleotide with phosphorothioate linkage
  modified_base 15: mod_base = OTHER; note = 5-methyl beta-D-oxy locked nucleotide with phosphorothioate linkage
  modified_base 16: mod_base = OTHER; note = beta-D-oxy locked nucleotide with phosphorothioate linkage
  modified_base 17: mod_base = OTHER; note = 5-methyl beta-D-oxy locked nucleotide with phosphorothioate linkage
cacaacatacacttctc

SEQ ID NO: 435 - DNA, 18 bp, synthetic construct
  source 1..18: mol_type = other DNA
  modified_base 1: mod_base = OTHER; note = 5-methyl beta-D-oxy locked nucleotide with phosphorothioate linkage
  modified_base 2: mod_base = OTHER; note = 5-methyl beta-D-oxy locked nucleotide with phosphorothioate linkage
  modified_base 3: mod_base = OTHER; note = Nucleotide with phosphorothioate linkage
  modified_base 4: mod_base = OTHER; note = Nucleotide with phosphorothioate linkage
  modified_base 5: mod_base = OTHER; note = Nucleotide with phosphorothioate linkage
  modified_base 6: mod_base = OTHER; note = Nucleotide with phosphorothioate linkage
  modified_base 7: mod_base = OTHER; note = Nucleotide with phosphorothioate linkage
  modified_base 8: mod_base = OTHER; note = Nucleotide with phosphorothioate linkage
  modified_base 9: mod_base = OTHER; note = Nucleotide with phosphorothioate linkage
  modified_base 10: mod_base = OTHER; note = Nucleotide with phosphorothioate linkage
  modified_base 11: mod_base = OTHER; note = Nucleotide with phosphorothioate linkage
  modified_base 12: mod_base = OTHER; note = Nucleotide with phosphorothioate linkage
  modified_base 13: mod_base = OTHER; note = Nucleotide with phosphorothioate linkage
  modified_base 14: mod_base = OTHER; note = Nucleotide with phosphorothioate linkage
  modified_base 15: mod_base = OTHER; note = Nucleotide with phosphorothioate linkage
  modified_base 16: mod_base = OTHER; note = Nucleotide with phosphorothioate linkage
  modified_base 17: mod_base = OTHER; note = beta-D-oxy locked nucleotide with phosphorothioate linkage
  modified_base 18: mod_base = OTHER; note = 5-methyl beta-D-oxy locked nucleotide with phosphorothioate linkage
ccacaacatacacttctc

SEQ ID NO: 436 - DNA, 18 bp, synthetic construct
  source 1..18: mol_type = other DNA
  modified_base 1: mod_base = OTHER; note = 5-methyl beta-D-oxy locked nucleotide with phosphorothioate linkage
  modified_base 2: mod_base = OTHER; note = 5-methyl beta-D-oxy locked nucleotide with phosphorothioate linkage
  modified_base 3: mod_base = OTHER; note = Nucleotide with phosphorothioate linkage
  modified_base 4: mod_base = OTHER; note = Nucleotide with phosphorothioate linkage
  modified_base 5: mod_base = OTHER; note = Nucleotide with phosphorothioate linkage
  modified_base 6: mod_base = OTHER; note = Nucleotide with phosphorothioate linkage
  modified_base 7: mod_base = OTHER; note = Nucleotide with phosphorothioate linkage
  modified_base 8: mod_base = OTHER; note = Nucleotide with phosphorothioate linkage
  modified_base 9: mod_base = OTHER; note = Nucleotide with phosphorothioate linkage
  modified_base 10: mod_base = OTHER; note = Nucleotide with phosphorothioate linkage
  modified_base 11: mod_base = OTHER; note = Nucleotide with phosphorothioate linkage
  modified_base 12: mod_base = OTHER; note = Nucleotide with phosphorothioate linkage
  modified_base 13: mod_base = OTHER; note = Nucleotide with phosphorothioate linkage
  modified_base 14: mod_base = OTHER; note = Nucleotide with phosphorothioate linkage
  modified_base 15: mod_base = OTHER; note = Nucleotide with phosphorothioate linkage
  modified_base 16: mod_base = OTHER; note = Nucleotide with phosphorothioate linkage
  modified_base 17: mod_base = OTHER; note = 5-methyl beta-D-oxy locked nucleotide with phosphorothioate linkage
  modified_base 18: mod_base = OTHER; note = beta-D-oxy locked nucleotide with phosphorothioate linkage
cccacaacatacacttct

SEQ ID NO: 437 - DNA, 19 bp, synthetic construct
  source 1..19: mol_type = other DNA
  modified_base 1: mod_base = OTHER; note = beta-D-oxy locked nucleotide with phosphorothioate linkage
  modified_base 2: mod_base = OTHER; note = 5-methyl beta-D-oxy locked nucleotide with phosphorothioate linkage
  modified_base 3: mod_base = OTHER; note = Nucleotide with phosphorothioate linkage
  modified_base 4: mod_base = OTHER; note = Nucleotide with phosphorothioate linkage
  modified_base 5: mod_base = OTHER; note = Nucleotide with phosphorothioate linkage
  modified_base 6: mod_base = OTHER; note = Nucleotide with phosphorothioate linkage
  modified_base 7: mod_base = OTHER; note = Nucleotide with phosphorothioate linkage
  modified_base 8: mod_base = OTHER; note = Nucleotide with phosphorothioate linkage
  modified_base 9: mod_base = OTHER; note = Nucleotide with phosphorothioate linkage
  modified_base 10: mod_base = OTHER; note = Nucleotide with phosphorothioate linkage
  modified_base 11: mod_base = OTHER; note = Nucleotide with phosphorothioate linkage
  modified_base 12: mod_base = OTHER; note = Nucleotide with phosphorothioate linkage
  modified_base 13: mod_base = OTHER; note = Nucleotide with phosphorothioate linkage
  modified_base 14: mod_base = OTHER; note = Nucleotide with phosphorothioate linkage
  modified_base 15: mod_base = OTHER; note = Nucleotide with phosphorothioate linkage
  modified_base 16: mod_base = OTHER; note = Nucleotide with phosphorothioate linkage
  modified_base 17: mod_base = OTHER; note = Nucleotide with phosphorothioate linkage
  modified_base 18: mod_base = OTHER; note = 5-methyl beta-D-oxy locked nucleotide with phosphorothioate linkage
  modified_base 19: mod_base = OTHER; note = beta-D-oxy locked nucleotide with phosphorothioate linkage
acccacaacatacacttct

SEQ ID NO: 438 - DNA, 19 bp, synthetic construct
  source 1..19: mol_type = other DNA
  modified_base 1: mod_base = OTHER; note = 5-methyl beta-D-oxy locked nucleotide with phosphorothioate linkage
  modified_base 2: mod_base = OTHER; note = beta-D-oxy locked nucleotide with phosphorothioate linkage
  modified_base 3: mod_base = OTHER; note = Nucleotide with phosphorothioate linkage
  modified_base 4: mod_base = OTHER; note = Nucleotide with phosphorothioate linkage
  modified_base 5: mod_base = OTHER; note = Nucleotide with phosphorothioate linkage
  modified_base 6: mod_base = OTHER; note = Nucleotide with phosphorothioate linkage
  modified_base 7: mod_base = OTHER; note = Nucleotide with phosphorothioate linkage
  modified_base 8: mod_base = OTHER; note = Nucleotide with phosphorothioate linkage
  modified_base 9: mod_base = OTHER; note = Nucleotide with phosphorothioate linkage
  modified_base 10: mod_base = OTHER; note = Nucleotide with phosphorothioate linkage
  modified_base 11: mod_base = OTHER; note = Nucleotide with phosphorothioate linkage
  modified_base 12: mod_base = OTHER; note = Nucleotide with phosphorothioate linkage
  modified_base 13: mod_base = OTHER; note = Nucleotide with phosphorothioate linkage
  modified_base 14: mod_base = OTHER; note = Nucleotide with phosphorothioate linkage
  modified_base 15: mod_base = OTHER; note = Nucleotide with phosphorothioate linkage
  modified_base 16: mod_base = OTHER; note = Nucleotide with phosphorothioate linkage
  modified_base 17: mod_base = OTHER; note = Nucleotide with phosphorothioate linkage
  modified_base 18: mod_base = OTHER; note = beta-D-oxy locked nucleotide with phosphorothioate linkage
  modified_base 19: mod_base = OTHER; note = 5-methyl beta-D-oxy locked nucleotide with phosphorothioate linkage
cacccacaacatacacttc

SEQ ID NO: 439 - DNA, 18 bp, synthetic construct
  source 1..18: mol_type = other DNA
  modified_base 1: mod_base = OTHER; note = beta-D-oxy locked nucleotide with phosphorothioate linkage
  modified_base 2: mod_base = OTHER; note = 5-methyl beta-D-oxy locked nucleotide with phosphorothioate linkage
  modified_base 3: mod_base = OTHER; note = Nucleotide with phosphorothioate linkage
  modified_base 4: mod_base = OTHER; note = Nucleotide with phosphorothioate linkage
  modified_base 5: mod_base = OTHER; note = Nucleotide with phosphorothioate linkage
  modified_base 6: mod_base = OTHER; note = Nucleotide with phosphorothioate linkage
  modified_base 7: mod_base = OTHER; note = Nucleotide with phosphorothioate linkage
  modified_base 8: mod_base = OTHER; note = Nucleotide with phosphorothioate linkage
  modified_base 9: mod_base = OTHER; note = Nucleotide with phosphorothioate linkage
  modified_base 10: mod_base = OTHER; note = Nucleotide with phosphorothioate linkage
  modified_base 11: mod_base = OTHER; note = Nucleotide with phosphorothioate linkage
  modified_base 12: mod_base = OTHER; note = Nucleotide with phosphorothioate linkage
  modified_base 13: mod_base = OTHER; note = Nucleotide with phosphorothioate linkage
  modified_base 14: mod_base = OTHER; note = Nucleotide with phosphorothioate linkage
  modified_base 15: mod_base = OTHER; note = Nucleotide with phosphorothioate linkage
  modified_base 16: mod_base = OTHER; note = Nucleotide with phosphorothioate linkage
  modified_base 17: mod_base = OTHER; note = beta-D-oxy locked nucleotide with phosphorothioate linkage
  modified_base 18: mod_base = OTHER; note = 5-methyl beta-D-oxy locked nucleotide with phosphorothioate linkage
acccacaacatacacttc

SEQ ID NO: 440 - DNA, 17 bp, synthetic construct
  source 1..17: mol_type = other DNA
  modified_base 1: mod_base = OTHER; note = 5-methyl beta-D-oxy locked nucleotide with phosphorothioate linkage
  modified_base 2: mod_base = OTHER; note = 5-methyl beta-D-oxy locked nucleotide with phosphorothioate linkage
  modified_base 3: mod_base = OTHER; note = Nucleotide with phosphorothioate linkage
  modified_base 4: mod_base = OTHER; note = Nucleotide with phosphorothioate linkage
  modified_base 5: mod_base = OTHER; note = Nucleotide with phosphorothioate linkage
  modified_base 6: mod_base = OTHER; note = Nucleotide with phosphorothioate linkage
  modified_base 7: mod_base = OTHER; note = Nucleotide with phosphorothioate linkage
  modified_base 8: mod_base = OTHER; note = Nucleotide with phosphorothioate linkage
  modified_base 9: mod_base = OTHER; note = Nucleotide with phosphorothioate linkage
  modified_base 10: mod_base = OTHER; note = Nucleotide with phosphorothioate linkage
  modified_base 11: mod_base = OTHER; note = Nucleotide with phosphorothioate linkage
  modified_base 12: mod_base = OTHER; note = Nucleotide with phosphorothioate linkage
  modified_base 13: mod_base = OTHER; note = Nucleotide with phosphorothioate linkage
  modified_base 14: mod_base = OTHER; note = Nucleotide with phosphorothioate linkage
  modified_base 15: mod_base = OTHER; note = Nucleotide with phosphorothioate linkage
  modified_base 16: mod_base = OTHER; note = beta-D-oxy locked nucleotide with phosphorothioate linkage
  modified_base 17: mod_base = OTHER; note = 5-methyl beta-D-oxy locked nucleotide with phosphorothioate linkage
cccacaacatacacttc

SEQ ID NO: 441 - DNA, 18 bp, synthetic construct
  source 1..18: mol_type = other DNA
  modified_base 1: mod_base = OTHER; note = 5-methyl beta-D-oxy locked nucleotide with phosphorothioate linkage
  modified_base 2: mod_base = OTHER; note = beta-D-oxy locked nucleotide with phosphorothioate linkage
  modified_base 3: mod_base = OTHER; note = 5-methyl beta-D-oxy locked nucleotide with phosphorothioate linkage
  modified_base 4: mod_base = OTHER; note = Nucleotide with phosphorothioate linkage
  modified_base 5: mod_base = OTHER; note = Nucleotide with phosphorothioate linkage
  modified_base 6: mod_base = OTHER; note = Nucleotide with phosphorothioate linkage
  modified_base 7: mod_base = OTHER; note = Nucleotide with phosphorothioate linkage
  modified_base 8: mod_base = OTHER; note = Nucleotide with phosphorothioate linkage
  modified_base 9: mod_base = OTHER; note = Nucleotide with phosphorothioate linkage
  modified_base 10: mod_base = OTHER; note = Nucleotide with phosphorothioate linkage
  modified_base 11: mod_base = OTHER; note = Nucleotide with phosphorothioate linkage
  modified_base 12: mod_base = OTHER; note = Nucleotide with phosphorothioate linkage
  modified_base 13: mod_base = OTHER; note = Nucleotide with phosphorothioate linkage
  modified_base 14: mod_base = OTHER; note = Nucleotide with phosphorothioate linkage
  modified_base 15: mod_base = OTHER; note = Nucleotide with phosphorothioate linkage
  modified_base 16: mod_base = OTHER; note = Nucleotide with phosphorothioate linkage
  modified_base 17: mod_base = OTHER; note = beta-D-oxy locked nucleotide with phosphorothioate linkage
  modified_base 18: mod_base = OTHER; note = beta-D-oxy locked nucleotide with phosphorothioate linkage
cacccacaacatacactt

SEQ ID NO: 442 - DNA, 17 bp, synthetic construct
  source 1..17: mol_type = other DNA
  modified_base 1: mod_base = OTHER; note = beta-D-oxy locked nucleotide with phosphorothioate linkage
  modified_base 2: mod_base = OTHER; note = 5-methyl beta-D-oxy locked nucleotide with phosphorothioate linkage
  modified_base 3: mod_base = OTHER; note = 5-methyl beta-D-oxy locked nucleotide with phosphorothioate linkage
  modified_base 4: mod_base = OTHER; note = Nucleotide with phosphorothioate linkage
  modified_base 5: mod_base = OTHER; note = Nucleotide with phosphorothioate linkage
  modified_base 6: mod_base = OTHER; note = Nucleotide with phosphorothioate linkage
  modified_base 7: mod_base = OTHER; note = Nucleotide with phosphorothioate linkage
  modified_base 8: mod_base = OTHER; note = Nucleotide with phosphorothioate linkage
  modified_base 9: mod_base = OTHER; note = Nucleotide with phosphorothioate linkage
  modified_base 10: mod_base = OTHER; note = Nucleotide with phosphorothioate linkage
  modified_base 11: mod_base = OTHER; note = Nucleotide with phosphorothioate linkage
  modified_base 12: mod_base = OTHER; note = Nucleotide with phosphorothioate linkage
  modified_base 13: mod_base = OTHER; note = Nucleotide with phosphorothioate linkage
  modified_base 14: mod_base = OTHER; note = Nucleotide with phosphorothioate linkage
  modified_base 15: mod_base = OTHER; note = 5-methyl beta-D-oxy locked nucleotide with phosphorothioate linkage
  modified_base 16: mod_base = OTHER; note = beta-D-oxy locked nucleotide with phosphorothioate linkage
  modified_base 17: mod_base = OTHER; note = beta-D-oxy locked nucleotide with phosphorothioate linkage
acccacaacatacactt

SEQ ID NO: 443 - DNA, 17 bp, synthetic construct
  source 1..17: mol_type = other DNA
  modified_base 1: mod_base = OTHER; note = 5-methyl beta-D-oxy locked nucleotide with phosphorothioate linkage
  modified_base 2: mod_base = OTHER; note = beta-D-oxy locked nucleotide with phosphorothioate linkage
  modified_base 3: mod_base = OTHER; note = Nucleotide with phosphorothioate linkage
  modified_base 4: mod_base = OTHER; note = Nucleotide with phosphorothioate linkage
  modified_base 5: mod_base = OTHER; note = Nucleotide with phosphorothioate linkage
  modified_base 6: mod_base = OTHER; note = Nucleotide with phosphorothioate linkage
  modified_base 7: mod_base = OTHER; note = Nucleotide with phosphorothioate linkage
  modified_base 8: mod_base = OTHER; note = Nucleotide with phosphorothioate linkage
  modified_base 9: mod_base = OTHER; note = Nucleotide with phosphorothioate linkage
  modified_base 10: mod_base = OTHER; note = Nucleotide with phosphorothioate linkage
  modified_base 11: mod_base = OTHER; note = Nucleotide with phosphorothioate linkage
  modified_base 12: mod_base = OTHER; note = Nucleotide with phosphorothioate linkage
  modified_base 13: mod_base = OTHER; note = Nucleotide with phosphorothioate linkage
  modified_base 14: mod_base = OTHER; note = Nucleotide with phosphorothioate linkage
  modified_base 15: mod_base = OTHER; note = Nucleotide with phosphorothioate linkage
  modified_base 16: mod_base = OTHER; note = 5-methyl beta-D-oxy locked nucleotide with phosphorothioate linkage
  modified_base 17: mod_base = OTHER; note = beta-D-oxy locked nucleotide with phosphorothioate linkage
cacccacaacatacact

SEQ ID NO: 444 - DNA, 17 bp, synthetic construct
  source 1..17: mol_type = other DNA
  modified_base 1: mod_base = OTHER; note = beta-D-oxy locked nucleotide with phosphorothioate linkage
  modified_base 2: mod_base = OTHER; note = beta-D-oxy locked nucleotide with phosphorothioate linkage
  modified_base 3: mod_base = OTHER; note = Nucleotide with phosphorothioate linkage
  modified_base 4: mod_base = OTHER; note = Nucleotide with phosphorothioate linkage
  modified_base 5: mod_base = OTHER; note = Nucleotide with phosphorothioate linkage
  modified_base 6: mod_base = OTHER; note = Nucleotide with phosphorothioate linkage
  modified_base 7: mod_base = OTHER; note = Nucleotide with phosphorothioate linkage
  modified_base 8: mod_base = OTHER; note = Nucleotide with phosphorothioate linkage
  modified_base 9: mod_base = OTHER; note = Nucleotide with phosphorothioate linkage
  modified_base 10: mod_base = OTHER; note = Nucleotide with phosphorothioate linkage
  modified_base 11: mod_base = OTHER; note = Nucleotide with phosphorothioate linkage
  modified_base 12: mod_base = OTHER; note = Nucleotide with phosphorothioate linkage
  modified_base 13: mod_base = OTHER; note = Nucleotide with phosphorothioate linkage
  modified_base 14: mod_base = OTHER; note = Nucleotide with phosphorothioate linkage
  modified_base 15: mod_base = OTHER; note = Nucleotide with phosphorothioate linkage
  modified_base 16: mod_base = OTHER; note = 5-methyl beta-D-oxy locked nucleotide with phosphorothioate linkage
  modified_base 17: mod_base = OTHER; note = beta-D-oxy locked nucleotide with phosphorothioate linkage
ggcacccacaacataca

SEQ ID NO: 445 - DNA, 16 bp, synthetic construct
  source 1..16: mol_type = other DNA
  modified_base 1: mod_base = OTHER; note = 5-methyl beta-D-oxy locked nucleotide with phosphorothioate linkage
  modified_base 2: mod_base = OTHER; note = beta-D-oxy locked nucleotide with phosphorothioate linkage
  modified_base 3: mod_base = OTHER; note = 5-methyl beta-D-oxy locked nucleotide with phosphorothioate linkage
  modified_base 4: mod_base = OTHER; note = Nucleotide with phosphorothioate linkage
  modified_base 5: mod_base = OTHER; note = Nucleotide with phosphorothioate linkage
  modified_base 6: mod_base = OTHER; note = Nucleotide with phosphorothioate linkage
  modified_base 7: mod_base = OTHER; note = Nucleotide with phosphorothioate linkage
  modified_base 8: mod_base = OTHER; note = Nucleotide with phosphorothioate linkage
  modified_base 9: mod_base = OTHER; note = Nucleotide with phosphorothioate linkage
  modified_base 10: mod_base = OTHER; note = Nucleotide with phosphorothioate linkage
  modified_base 11: mod_base = OTHER; note = Nucleotide with phosphorothioate linkage
  modified_base 12: mod_base = OTHER; note = Nucleotide with phosphorothioate linkage
  modified_base 13: mod_base = OTHER; note = Nucleotide with phosphorothioate linkage
  modified_base 14: mod_base = OTHER; note = 5-methyl beta-D-oxy locked nucleotide with phosphorothioate linkage
  modified_base 15: mod_base = OTHER; note = beta-D-oxy locked nucleotide with phosphorothioate linkage
  modified_base 16: mod_base = OTHER; note = beta-D-oxy locked nucleotide with phosphorothioate linkage
ctccataccacaactg

SEQ ID NO: 446 - DNA, 16 bp, synthetic construct
  source 1..16: mol_type = other DNA
  modified_base 1: mod_base = OTHER; note = 5-methyl beta-D-oxy locked nucleotide with phosphorothioate linkage
  modified_base 2: mod_base = OTHER; note = 5-methyl beta-D-oxy locked nucleotide with phosphorothioate linkage
  modified_base 3: mod_base = OTHER; note = Nucleotide with phosphorothioate linkage
  modified_base 4: mod_base = OTHER; note = Nucleotide with phosphorothioate linkage
  modified_base 5: mod_base = OTHER; note = Nucleotide with phosphorothioate linkage
  modified_base 6: mod_base = OTHER; note = Nucleotide with phosphorothioate linkage
  modified_base 7: mod_base = OTHER; note = Nucleotide with phosphorothioate linkage
  modified_base 8: mod_base = OTHER; note = Nucleotide with phosphorothioate linkage
  modified_base 9: mod_base = OTHER; note = Nucleotide with phosphorothioate linkage
  modified_base 10: mod_base = OTHER; note = Nucleotide with phosphorothioate linkage
  modified_base 11: mod_base = OTHER; note = Nucleotide with phosphorothioate linkage
  modified_base 12: mod_base = OTHER; note = Nucleotide with phosphorothioate linkage
  modified_base 13: mod_base = OTHER; note = Nucleotide with phosphorothioate linkage
  modified_base 14: mod_base = OTHER; note = Nucleotide with phosphorothioate linkage
  modified_base 15: mod_base = OTHER; note = 5-methyl beta-D-oxy locked nucleotide with phosphorothioate linkage
  modified_base 16: mod_base = OTHER; note = beta-D-oxy locked nucleotide with phosphorothioate linkage
cctccataccacaact

SEQ ID NO: 447 - DNA, 17 bp, synthetic construct
  source 1..17: mol_type = other DNA
  modified_base 1: mod_base = OTHER; note = beta-D-oxy locked nucleotide with phosphorothioate linkage
  modified_base 2: mod_base = OTHER; note = 5-methyl beta-D-oxy locked nucleotide with phosphorothioate linkage
  modified_base 3: mod_base = OTHER; note = Nucleotide with phosphorothioate linkage
  modified_base 4: mod_base = OTHER; note = Nucleotide with phosphorothioate linkage
  modified_base 5: mod_base = OTHER; note = Nucleotide with phosphorothioate linkage
  modified_base 6: mod_base = OTHER; note = Nucleotide with phosphorothioate linkage
  modified_base 7: mod_base = OTHER; note = Nucleotide with phosphorothioate linkage
  modified_base 8: mod_base = OTHER; note = Nucleotide with phosphorothioate linkage
  modified_base 9: mod_base = OTHER; note = Nucleotide with phosphorothioate linkage
  modified_base 10: mod_base = OTHER; note = Nucleotide with phosphorothioate linkage
  modified_base 11: mod_base = OTHER; note = Nucleotide with phosphorothioate linkage
  modified_base 12: mod_base = OTHER; note = Nucleotide with phosphorothioate linkage
  modified_base 13: mod_base = OTHER; note = Nucleotide with phosphorothioate linkage
  modified_base 14: mod_base = OTHER; note = Nucleotide with phosphorothioate linkage
  modified_base 15: mod_base = OTHER; note = Nucleotide with phosphorothioate linkage
  modified_base 16: mod_base = OTHER; note = beta-D-oxy locked nucleotide with phosphorothioate linkage
  modified_base 17: mod_base = OTHER; note = 5-methyl beta-D-oxy locked nucleotide with phosphorothioate linkage
accctccataccacaac

SEQ ID NO: 448 - DNA, 16 bp, synthetic construct
  source 1..16: mol_type = other DNA
  modified_base 1: mod_base = OTHER; note = 5-methyl beta-D-oxy locked nucleotide with phosphorothioate linkage
  modified_base 2: mod_base = OTHER; note = 5-methyl beta-D-oxy locked nucleotide with phosphorothioate linkage
  modified_base 3: mod_base = OTHER; note = Nucleotide with phosphorothioate linkage
  modified_base 4: mod_base = OTHER; note = Nucleotide with phosphorothioate linkage
  modified_base 5: mod_base = OTHER; note = Nucleotide with phosphorothioate linkage
  modified_base 6: mod_base = OTHER; note = Nucleotide with phosphorothioate linkage
  modified_base 7: mod_base = OTHER; note = Nucleotide with phosphorothioate linkage
  modified_base 8: mod_base = OTHER; note = Nucleotide with phosphorothioate linkage
  modified_base 9: mod_base = OTHER; note = Nucleotide with phosphorothioate linkage
  modified_base 10: mod_base = OTHER; note = Nucleotide with phosphorothioate linkage
  modified_base 11: mod_base = OTHER; note = Nucleotide with phosphorothioate linkage
  modified_base 12: mod_base = OTHER; note = Nucleotide with phosphorothioate linkage
  modified_base 13: mod_base = OTHER; note = Nucleotide with phosphorothioate linkage
  modified_base 14: mod_base = OTHER; note = Nucleotide with phosphorothioate linkage
  modified_base 15: mod_base = OTHER; note = beta-D-oxy locked nucleotide with phosphorothioate linkage
  modified_base 16: mod_base = OTHER; note = 5-methyl beta-D-oxy locked nucleotide with phosphorothioate linkage
ccctccataccacaac

SEQ ID NO: 449 - DNA, 17 bp, synthetic construct
  source 1..17: mol_type = other DNA
  modified_base 1: mod_base = OTHER; note = 5-methyl beta-D-oxy locked nucleotide with phosphorothioate linkage
  modified_base 2: mod_base = OTHER; note = beta-D-oxy locked nucleotide with phosphorothioate linkage
  modified_base 3: mod_base = OTHER; note = Nucleotide with phosphorothioate linkage
  modified_base 4: mod_base = OTHER; note = Nucleotide with phosphorothioate linkage
  modified_base 5: mod_base = OTHER; note = Nucleotide with phosphorothioate linkage
  modified_base 6: mod_base = OTHER; note = Nucleotide with phosphorothioate linkage
  modified_base 7: mod_base = OTHER; note = Nucleotide with phosphorothioate linkage
  modified_base 8: mod_base = OTHER; note = Nucleotide with phosphorothioate linkage
  modified_base 9: mod_base = OTHER; note = Nucleotide with phosphorothioate linkage
  modified_base 10: mod_base = OTHER; note = Nucleotide with phosphorothioate linkage
  modified_base 11: mod_base = OTHER; note = Nucleotide with phosphorothioate linkage
  modified_base 12: mod_base = OTHER; note = Nucleotide with phosphorothioate linkage
  modified_base 13: mod_base = OTHER; note = Nucleotide with phosphorothioate linkage
  modified_base 14: mod_base = OTHER; note = Nucleotide with phosphorothioate linkage
  modified_base 15: mod_base = OTHER; note = Nucleotide with phosphorothioate linkage
  modified_base 16: mod_base = OTHER; note = beta-D-oxy locked nucleotide with phosphorothioate linkage
  modified_base 17: mod_base = OTHER; note = beta-D-oxy locked nucleotide with phosphorothioate linkage
caccctccataccacaa

SEQ ID NO: 450 - DNA, 17 bp, synthetic construct
  source 1..17: mol_type = other DNA
  modified_base 1: mod_base = OTHER; note = 5-methyl beta-D-oxy locked nucleotide with phosphorothioate linkage
  modified_base 2: mod_base = OTHER; note = beta-D-oxy locked nucleotide with phosphorothioate linkage
  modified_base 3: mod_base = OTHER; note = Nucleotide with phosphorothioate linkage
  modified_base 4: mod_base = OTHER; note = Nucleotide with phosphorothioate linkage
  modified_base 5: mod_base = OTHER; note = Nucleotide with phosphorothioate linkage
  modified_base 6: mod_base = OTHER; note = Nucleotide with phosphorothioate linkage
  modified_base 7: mod_base = OTHER; note = Nucleotide with phosphorothioate linkage
  modified_base 8: mod_base = OTHER; note = Nucleotide with phosphorothioate linkage
  modified_base 9: mod_base = OTHER; note = Nucleotide with phosphorothioate linkage
  modified_base 10: mod_base = OTHER; note = Nucleotide with phosphorothioate linkage
  modified_base 11: mod_base = OTHER; note = Nucleotide with phosphorothioate linkage
  modified_base 12: mod_base = OTHER; note = Nucleotide with phosphorothioate linkage
  modified_base 13: mod_base = OTHER; note = Nucleotide with phosphorothioate linkage
  modified_base 14: mod_base = OTHER; note = Nucleotide with phosphorothioate linkage
  modified_base 15: mod_base = OTHER; note = Nucleotide with phosphorothioate linkage
  modified_base 16: mod_base = OTHER; note = 5-methyl beta-D-oxy locked nucleotide with phosphorothioate linkage
  modified_base 17: mod_base = OTHER; note = beta-D-oxy locked nucleotide with phosphorothioate linkage
caaacctagaaccacca

SEQ ID NO: 451 - DNA, 16 bp, synthetic construct
  source 1..16: mol_type = other DNA
  modified_base 1: mod_base = OTHER; note = 5-methyl beta-D-oxy locked nucleotide with phosphorothioate linkage
  modified_base 2: mod_base = OTHER; note = beta-D-oxy locked nucleotide with phosphorothioate linkage
  modified_base 3: mod_base = OTHER; note = beta-D-oxy locked nucleotide with phosphorothioate linkage
  modified_base 4: mod_base = OTHER; note = beta-D-oxy locked nucleotide with phosphorothioate linkage
  modified_base 5: mod_base = OTHER; note = Nucleotide with phosphorothioate linkage
  modified_base 6: mod_base = OTHER; note = Nucleotide with phosphorothioate linkage
  modified_base 7: mod_base = OTHER; note = Nucleotide with phosphorothioate linkage
  modified_base 8: mod_base = OTHER; note = Nucleotide with phosphorothioate linkage
  modified_base 9: mod_base = OTHER; note = Nucleotide with phosphorothioate linkage
  modified_base 10: mod_base = OTHER; note = Nucleotide with phosphorothioate linkage
  modified_base 11: mod_base = OTHER; note = Nucleotide with phosphorothioate linkage
  modified_base 12: mod_base = OTHER; note = Nucleotide with phosphorothioate linkage
  modified_base 13: mod_base = OTHER; note = Nucleotide with phosphorothioate linkage
  modified_base 14: mod_base = OTHER; note = Nucleotide with phosphorothioate linkage
  modified_base 15: mod_base = OTHER; note = 5-methyl beta-D-oxy locked nucleotide with phosphorothioate linkage
  modified_base 16: mod_base = OTHER; note = 5-methyl beta-D-oxy locked nucleotide with phosphorothioate linkage
caaacctagaaccacc

SEQ ID NO: 452 - DNA, 17 bp, synthetic construct
  source 1..17: mol_type = other DNA
  modified_base 1: mod_base = OTHER; note = beta-D-oxy locked nucleotide with phosphorothioate linkage
  modified_base 2: mod_base = OTHER; note = 5-methyl beta-D-oxy locked nucleotide with phosphorothioate linkage
  modified_base 3: mod_base = OTHER; note = beta-D-oxy locked nucleotide with phosphorothioate linkage
  modified_base 4: mod_base = OTHER; note = Nucleotide with phosphorothioate linkage
  modified_base 5: mod_base = OTHER; note = Nucleotide with phosphorothioate linkage
  modified_base 6: mod_base = OTHER; note = Nucleotide with phosphorothioate linkage
  modified_base 7: mod_base = OTHER; note = Nucleotide with phosphorothioate linkage
  modified_base 8: mod_base = OTHER; note = Nucleotide with phosphorothioate linkage
  modified_base 9: mod_base = OTHER; note = Nucleotide with phosphorothioate linkage
  modified_base 10: mod_base = OTHER; note = Nucleotide with phosphorothioate linkage
  modified_base 11: mod_base = OTHER; note = Nucleotide with phosphorothioate linkage
  modified_base 12: mod_base = OTHER; note = Nucleotide with phosphorothioate linkage
  modified_base 13: mod_base = OTHER; note = Nucleotide with phosphorothioate linkage
  modified_base 14: mod_base = OTHER; note = Nucleotide with phosphorothioate linkage
  modified_base 15: mod_base = OTHER; note = beta-D-oxy locked nucleotide with phosphorothioate linkage
  modified_base 16: mod_base = OTHER; note = 5-methyl beta-D-oxy locked nucleotide with phosphorothioate linkage
  modified_base 17: mod_base = OTHER; note = 5-methyl beta-D-oxy locked nucleotide with phosphorothioate linkage
tcaaacctagaaccacc

SEQ ID NO: 453 - DNA, 17 bp, synthetic construct
  source 1..17: mol_type = other DNA
  modified_base 1: mod_base = OTHER; note = beta-D-oxy locked nucleotide with phosphorothioate linkage
  modified_base 2: mod_base = OTHER; note = beta-D-oxy locked nucleotide with phosphorothioate linkage
  modified_base 3: mod_base = OTHER; note = 5-methyl beta-D-oxy locked nucleotide with phosphorothioate linkage
  modified_base 4: mod_base = OTHER; note = Nucleotide with phosphorothioate linkage
  modified_base 5: mod_base = OTHER; note = Nucleotide with phosphorothioate linkage
  modified_base 6: mod_base = OTHER; note = Nucleotide with phosphorothioate linkage
  modified_base 7: mod_base = OTHER; note = Nucleotide with phosphorothioate linkage
  modified_base 8: mod_base = OTHER; note = Nucleotide with phosphorothioate linkage
  modified_base 9: mod_base = OTHER; note = Nucleotide with phosphorothioate linkage
  modified_base 10: mod_base = OTHER; note = Nucleotide with phosphorothioate linkage
  modified_base 11: mod_base = OTHER; note = Nucleotide with phosphorothioate linkage
  modified_base 12: mod_base = OTHER; note = Nucleotide with phosphorothioate linkage
  modified_base 13: mod_base = OTHER; note = Nucleotide with phosphorothioate linkage
  modified_base 14: mod_base = OTHER; note = 5-methyl beta-D-oxy locked nucleotide with phosphorothioate linkage
  modified_base 15: mod_base = OTHER; note = 5-methyl beta-D-oxy locked nucleotide with phosphorothioate linkage
  modified_base 16: mod_base = OTHER; note = beta-D-oxy locked nucleotide with phosphorothioate linkage
  modified_base 17: mod_base = OTHER; note = 5-methyl beta-D-oxy locked nucleotide with phosphorothioate linkage
atcaaacctagaaccac

SEQ ID NO: 454 - DNA, 18 bp, synthetic construct
  source 1..18: mol_type = other DNA
  modified_base 1: mod_base = OTHER; note = 5-methyl beta-D-oxy locked nucleotide with phosphorothioate linkage
  modified_base 2: mod_base = OTHER; note = beta-D-oxy locked nucleotide with phosphorothioate linkage
  modified_base 3: mod_base = OTHER; note = Nucleotide with phosphorothioate linkage
  modified_base 4: mod_base = OTHER; note = Nucleotide with phosphorothioate linkage
  modified_base 5: mod_base = OTHER; note = Nucleotide with phosphorothioate linkage
  modified_base 6: mod_base = OTHER; note = Nucleotide with phosphorothioate linkage
  modified_base 7: mod_base = OTHER; note = Nucleotide with phosphorothioate linkage
  modified_base 8: mod_base = OTHER; note = Nucleotide with phosphorothioate linkage
  modified_base 9: mod_base = OTHER; note = Nucleotide with phosphorothioate linkage
  modified_base 10: mod_base = OTHER; note = Nucleotide with phosphorothioate linkage
  modified_base 11: mod_base = OTHER; note = Nucleotide with phosphorothioate linkage
  modified_base 12: mod_base = OTHER; note = Nucleotide with phosphorothioate linkage
  modified_base 13: mod_base = OTHER; note = Nucleotide with phosphorothioate linkage
  modified_base 14: mod_base = OTHER; note = Nucleotide with phosphorothioate linkage
  modified_base 15: mod_base = OTHER; note = Nucleotide with phosphorothioate linkage
  modified_base 16: mod_base = OTHER; note = 5-methyl beta-D-oxy locked nucleotide with phosphorothioate linkage
  modified_base 17: mod_base = OTHER; note = beta-D-oxy locked nucleotide with phosphorothioate linkage
  modified_base 18: mod_base = OTHER; note = 5-methyl beta-D-oxy locked nucleotide with phosphorothioate linkage
catcaaacctagaaccac

SEQ ID NO: 455 - DNA, 16 bp, synthetic construct
  source 1..16: mol_type = other DNA
  modified_base 1: mod_base = OTHER; note = beta-D-oxy locked nucleotide with phosphorothioate linkage
  modified_base 2: mod_base = OTHER; note = 5-methyl beta-D-oxy locked nucleotide with phosphorothioate linkage
  modified_base 3: mod_base = OTHER; note = beta-D-oxy locked nucleotide with phosphorothioate linkage
  modified_base 4: mod_base = OTHER; note = Nucleotide with phosphorothioate linkage
  modified_base 5: mod_base = OTHER; note = Nucleotide with phosphorothioate linkage
  modified_base 6: mod_base = OTHER; note = Nucleotide with phosphorothioate linkage
  modified_base 7: mod_base = OTHER; note = Nucleotide with phosphorothioate linkage
  modified_base 8: mod_base = OTHER; note = Nucleotide with phosphorothioate linkage
  modified_base 9: mod_base = OTHER; note = Nucleotide with phosphorothioate linkage
  modified_base 10: mod_base = OTHER; note = Nucleotide with phosphorothioate linkage
  modified_base 11: mod_base = OTHER; note = Nucleotide with phosphorothioate linkage
  modified_base 12: mod_base = OTHER; note = Nucleotide with phosphorothioate linkage
  modified_base 13: mod_base = OTHER; note = Nucleotide with phosphorothioate linkage
  modified_base 14: mod_base = OTHER; note = 5-methyl beta-D-oxy locked nucleotide with phosphorothioate linkage
  modified_base 15: mod_base = OTHER; note = beta-D-oxy locked nucleotide with phosphorothioate linkage
  modified_base 16: mod_base = OTHER; note = 5-methyl beta-D-oxy locked nucleotide with phosphorothioate linkage
tcaaacctagaaccac

SEQ ID NO: 456 - DNA, 16 bp, synthetic construct
  source 1..16: mol_type = other DNA
  modified_base 1: mod_base = OTHER; note = 5-methyl beta-D-oxy locked nucleotide with phosphorothioate linkage
  modified_base 2: mod_base = OTHER; note = beta-D-oxy locked nucleotide with phosphorothioate linkage
  modified_base 3: mod_base = OTHER; note = beta-D-oxy locked nucleotide with phosphorothioate linkage
  modified_base 4: mod_base = OTHER; note = Nucleotide with phosphorothioate linkage
  modified_base 5: mod_base = OTHER; note = Nucleotide with phosphorothioate linkage
  modified_base 6: mod_base = OTHER; note = Nucleotide with phosphorothioate linkage
  modified_base 7: mod_base = OTHER; note = Nucleotide with phosphorothioate linkage
  modified_base 8: mod_base = OTHER; note = Nucleotide with phosphorothioate linkage
  modified_base 9: mod_base = OTHER; note = Nucleotide with phosphorothioate linkage
  modified_base 10: mod_base = OTHER; note = Nucleotide with phosphorothioate linkage
  modified_base 11: mod_base = OTHER; note = Nucleotide with phosphorothioate linkage
  modified_base 12: mod_base = OTHER; note = Nucleotide with phosphorothioate linkage
  modified_base 13: mod_base = OTHER; note = beta-D-oxy locked nucleotide with phosphorothioate linkage
  modified_base 14: mod_base = OTHER; note = beta-D-oxy locked nucleotide with phosphorothioate linkage
  modified_base 15: mod_base = OTHER; note = 5-methyl beta-D-oxy locked nucleotide with phosphorothioate linkage
  modified_base 16: mod_base = OTHER; note = 5-methyl beta-D-oxy locked nucleotide with phosphorothioate linkage
catcaaacctagaacc

SEQ ID NO: 457 - DNA, 16 bp, synthetic construct
  source 1..16: mol_type = other DNA
  modified_base 1: mod_base = OTHER; note = 5-methyl beta-D-oxy locked nucleotide with phosphorothioate linkage
  modified_base 2: mod_base = OTHER; note = 5-methyl beta-D-oxy locked nucleotide with phosphorothioate linkage
  modified_base 3: mod_base = OTHER; note = beta-D-oxy locked nucleotide with phosphorothioate linkage
  modified_base 4: mod_base = OTHER; note = Nucleotide with phosphorothioate linkage
  modified_base 5: mod_base = OTHER; note = Nucleotide with phosphorothioate linkage
  modified_base 6: mod_base = OTHER; note = Nucleotide with phosphorothioate linkage
  modified_base 7: mod_base = OTHER; note = Nucleotide with phosphorothioate linkage
  modified_base 8: mod_base = OTHER; note = Nucleotide with phosphorothioate linkage
  modified_base 9: mod_base = OTHER; note = Nucleotide with phosphorothioate linkage
  modified_base 10: mod_base = OTHER; note = Nucleotide with phosphorothioate linkage
  modified_base 11: mod_base = OTHER; note = Nucleotide with phosphorothioate linkage
  modified_base 12: mod_base = OTHER; note = Nucleotide with phosphorothioate linkage
  modified_base 13: mod_base = OTHER; note = Nucleotide with phosphorothioate linkage
  modified_base 14: mod_base = OTHER; note = beta-D-oxy locked nucleotide with phosphorothioate linkage
  modified_base 15: mod_base = OTHER; note = beta-D-oxy locked nucleotide with phosphorothioate linkage
  modified_base 16: mod_base = OTHER; note = 5-methyl beta-D-oxy locked nucleotide with phosphorothioate linkage
ccatcaaacctagaac

SEQ ID NO: 458 - DNA, 17 bp, synthetic construct
  source 1..17: mol_type = other DNA
  modified_base 1: mod_base = OTHER; note = beta-D-oxy locked nucleotide with phosphorothioate linkage
  modified_base 2: mod_base = OTHER; note = beta-D-oxy locked nucleotide with phosphorothioate linkage
  modified_base 3: mod_base = OTHER; note = Nucleotide with phosphorothioate linkage
  modified_base 4: mod_base = OTHER; note = Nucleotide with phosphorothioate linkage
  modified_base 5: mod_base = OTHER; note = Nucleotide with phosphorothioate linkage
  modified_base 6: mod_base = OTHER; note = Nucleotide with phosphorothioate linkage
  modified_base 7: mod_base = OTHER; note = Nucleotide with phosphorothioate linkage
  modified_base 8: mod_base = OTHER; note = Nucleotide with phosphorothioate linkage
  modified_base 9: mod_base = OTHER; note = Nucleotide with phosphorothioate linkage
  modified_base 10: mod_base = OTHER; note = Nucleotide with phosphorothioate linkage
  modified_base 11: mod_base = OTHER; note = Nucleotide with phosphorothioate linkage
  modified_base 12: mod_base = OTHER; note = Nucleotide with phosphorothioate linkage
  modified_base 13: mod_base = OTHER; note = Nucleotide with phosphorothioate linkage
  modified_base 14: mod_base = OTHER; note = Nucleotide with phosphorothioate linkage
  modified_base 15: mod_base = OTHER; note = 5-methyl beta-D-oxy locked nucleotide with phosphorothioate linkage
  modified_base 16: mod_base = OTHER; note = beta-D-oxy locked nucleotide with phosphorothioate linkage
  modified_base 17: mod_base = OTHER; note = beta-D-oxy locked nucleotide with phosphorothioate linkage
agcatccatcaaaccta

SEQ ID NO: 459 - DNA, 16 bp, synthetic construct
  source 1..16: mol_type = other DNA
  modified_base 1: mod_base = OTHER; note = beta-D-oxy locked nucleotide with phosphorothioate linkage
  modified_base 2: mod_base = OTHER; note = 5-methyl beta-D-oxy locked nucleotide with phosphorothioate linkage
  modified_base 3: mod_base = OTHER; note = Nucleotide with phosphorothioate linkage
  modified_base 4: mod_base = OTHER; note = Nucleotide with phosphorothioate linkage
  modified_base 5: mod_base = OTHER; note = Nucleotide with phosphorothioate linkage
  modified_base 6: mod_base = OTHER; note = Nucleotide with phosphorothioate linkage
  modified_base 7: mod_base = OTHER; note = Nucleotide with phosphorothioate linkage
  modified_base 8: mod_base = OTHER; note = Nucleotide with phosphorothioate linkage
  modified_base 9: mod_base = OTHER; note = Nucleotide with phosphorothioate linkage
  modified_base 10: mod_base = OTHER; note = Nucleotide with phosphorothioate linkage
  modified_base 11: mod_base = OTHER; note = Nucleotide with phosphorothioate linkage
  modified_base 12: mod_base = OTHER; note = Nucleotide with phosphorothioate linkage
  modified_base 13: mod_base = OTHER; note = Nucleotide with phosphorothioate linkage
  modified_base 14: mod_base = OTHER; note = 5-methyl beta-D-oxy locked nucleotide with phosphorothioate linkage
  modified_base 15: mod_base = OTHER; note = beta-D-oxy locked nucleotide with phosphorothioate linkage
  modified_base 16: mod_base = OTHER; note = beta-D-oxy locked nucleotide with phosphorothioate linkage
gcatccatcaaaccta

SEQ ID NO: 460 - DNA, 17 bp, synthetic construct
  source 1..17: mol_type = other DNA
  modified_base 1: mod_base = OTHER; note = 5-methyl beta-D-oxy locked nucleotide with phosphorothioate linkage
  modified_base 2: mod_base = OTHER; note = beta-D-oxy locked nucleotide with phosphorothioate linkage
  modified_base 3: mod_base = OTHER; note = Nucleotide with phosphorothioate linkage
  modified_base 4: mod_base = OTHER; note = Nucleotide with phosphorothioate linkage
  modified_base 5: mod_base = OTHER; note = Nucleotide with phosphorothioate linkage
  modified_base 6: mod_base = OTHER; note = Nucleotide with phosphorothioate linkage
  modified_base 7: mod_base = OTHER; note = Nucleotide with phosphorothioate linkage
  modified_base 8: mod_base = OTHER; note = Nucleotide with phosphorothioate linkage
  modified_base 9: mod_base = OTHER; note = Nucleotide with phosphorothioate linkage
  modified_base 10: mod_base = OTHER; note = Nucleotide with phosphorothioate linkage
  modified_base 11: mod_base = OTHER; note = Nucleotide with phosphorothioate linkage
  modified_base 12: mod_base = OTHER; note = Nucleotide with phosphorothioate linkage
  modified_base 13: mod_base = OTHER; note = Nucleotide with phosphorothioate linkage
  modified_base 14: mod_base = OTHER; note = Nucleotide with phosphorothioate linkage
  modified_base 15: mod_base = OTHER; note = Nucleotide with phosphorothioate linkage
  modified_base 16: mod_base = OTHER; note = 5-methyl beta-D-oxy locked nucleotide with phosphorothioate linkage
  modified_base 17: mod_base = OTHER; note = beta-D-oxy locked nucleotide with phosphorothioate linkage
cagcatccatcaaacct

SEQ ID NO: 461 - DNA, 17 bp, synthetic construct
  source 1..17: mol_type = other DNA
  modified_base 1: mod_base = OTHER; note = beta-D-oxy locked nucleotide with phosphorothioate linkage
  modified_base 2: mod_base = OTHER; note = 5-methyl beta-D-oxy locked nucleotide with phosphorothioate linkage
  modified_base 3: mod_base = OTHER; note = Nucleotide with phosphorothioate linkage
  modified_base 4: mod_base = OTHER; note = Nucleotide with phosphorothioate linkage
  modified_base 5: mod_base = OTHER; note = Nucleotide with phosphorothioate linkage
  modified_base 6: mod_base = OTHER; note = Nucleotide with phosphorothioate linkage
  modified_base 7: mod_base = OTHER; note = Nucleotide with phosphorothioate linkage
  modified_base 8: mod_base = OTHER; note = Nucleotide with phosphorothioate linkage
  modified_base 9: mod_base = OTHER; note = Nucleotide with phosphorothioate linkage
  modified_base 10: mod_base = OTHER; note = Nucleotide with phosphorothioate linkage
  modified_base 11: mod_base = OTHER; note = Nucleotide with phosphorothioate linkage
  modified_base 12: mod_base = OTHER; note = Nucleotide with phosphorothioate linkage
  modified_base 13: mod_base = OTHER; note = Nucleotide with phosphorothioate linkage
  modified_base 14: mod_base = OTHER; note = Nucleotide with phosphorothioate linkage
  modified_base 15: mod_base = OTHER; note = Nucleotide with phosphorothioate linkage
  modified_base 16: mod_base = OTHER; note = 5-methyl beta-D-oxy locked nucleotide with phosphorothioate linkage
  modified_base 17: mod_base = OTHER; note = 5-methyl beta-D-oxy locked nucleotide with phosphorothioate linkage
tcagcatccatcaaacc

SEQ ID NO: 462 - DNA, 16 bp, synthetic construct
  source 1..16: mol_type = other DNA
  modified_base 1: mod_base = OTHER; note = 5-methyl beta-D-oxy locked nucleotide with phosphorothioate linkage
  modified_base 2: mod_base = OTHER; note = beta-D-oxy locked nucleotide with phosphorothioate linkage
  modified_base 3: mod_base = OTHER; note = beta-D-oxy locked nucleotide with phosphorothioate linkage
  modified_base 4: mod_base = OTHER; note = Nucleotide with phosphorothioate linkage
  modified_base 5: mod_base = OTHER; note = Nucleotide with phosphorothioate linkage
  modified_base 6: mod_base = OTHER; note = Nucleotide with phosphorothioate linkage
  modified_base 7: mod_base = OTHER; note = Nucleotide with phosphorothioate linkage
  modified_base 8: mod_base = OTHER; note = Nucleotide with phosphorothioate linkage
  modified_base 9: mod_base = OTHER; note = Nucleotide with phosphorothioate linkage
  modified_base 10: mod_base = OTHER; note = Nucleotide with phosphorothioate linkage
  modified_base 11: mod_base = OTHER; note = Nucleotide with phosphorothioate linkage
  modified_base 12: mod_base = OTHER; note = Nucleotide with phosphorothioate linkage
  modified_base 13: mod_base = OTHER; note = beta-D-oxy locked nucleotide with phosphorothioate linkage
  modified_base 14: mod_base = OTHER; note = beta-D-oxy locked nucleotide with phosphorothioate linkage
  modified_base 15: mod_base = OTHER; note = 5-methyl beta-D-oxy locked nucleotide with phosphorothioate linkage
  modified_base 16: mod_base = OTHER; note = beta-D-oxy locked nucleotide with phosphorothioate linkage
cagcaaacttgcaaca

SEQ ID NO: 463 - DNA, 16 bp, synthetic construct
  source 1..16: mol_type = other DNA
  modified_base 1: mod_base = OTHER; note = beta-D-oxy locked nucleotide with phosphorothioate linkage
  modified_base 2: mod_base = OTHER; note = 5-methyl beta-D-oxy locked nucleotide with phosphorothioate linkage
  modified_base 3: mod_base = OTHER; note = Nucleotide with phosphorothioate linkage
  modified_base 4: mod_base = OTHER; note = Nucleotide with phosphorothioate linkage
  modified_base 5: mod_base = OTHER; note = Nucleotide with phosphorothioate linkage
  modified_base 6: mod_base = OTHER; note = Nucleotide with phosphorothioate linkage
  modified_base 7: mod_base = OTHER; note = Nucleotide with phosphorothioate linkage
  modified_base 8: mod_base = OTHER; note = Nucleotide with phosphorothioate linkage
  modified_base 9: mod_base = OTHER; note = Nucleotide with phosphorothioate linkage
  modified_base 10: mod_base = OTHER; note = Nucleotide with phosphorothioate linkage
  modified_base 11: mod_base = OTHER; note = Nucleotide with phosphorothioate linkage
  modified_base 12: mod_base = OTHER; note = Nucleotide with phosphorothioate linkage
  modified_base 13: mod_base = OTHER; note = Nucleotide with phosphorothioate linkage
  modified_base 14: mod_base = OTHER; note = Nucleotide with phosphorothioate linkage
  modified_base 15: mod_base = OTHER; note = beta-D-oxy locked nucleotide with phosphorothioate linkage
  modified_base 16: mod_base = OTHER; note = 5-methyl beta-D-oxy locked nucleotide with phosphorothioate linkage
tctacaggttccactc

SEQ ID NO: 464 - DNA, 15 bp, synthetic construct
  source 1..15: mol_type = other DNA
  modified_base 1: mod_base = OTHER; note = beta-D-oxy locked nucleotide with phosphorothioate linkage
  modified_base 2: mod_base = OTHER; note = beta-D-oxy locked nucleotide with phosphorothioate linkage
  modified_base 3: mod_base = OTHER; note = 5-methyl beta-D-oxy locked nucleotide with phosphorothioate linkage
  modified_base 4: mod_base = OTHER; note = beta-D-oxy locked nucleotide with phosphorothioate linkage
  modified_base 5: mod_base = OTHER; note = Nucleotide with phosphorothioate linkage
  modified_base 6: mod_base = OTHER; note = Nucleotide with phosphorothioate linkage
  modified_base 7: mod_base = OTHER; note = Nucleotide with phosphorothioate linkage
  modified_base 8: mod_base = OTHER; note = Nucleotide with phosphorothioate linkage
  modified_base 9: mod_base = OTHER; note = Nucleotide with phosphorothioate linkage
  modified_base 10: mod_base = OTHER; note = Nucleotide with phosphorothioate linkage
  modified_base 11: mod_base = OTHER; note = Nucleotide with phosphorothioate linkage
  modified_base 12: mod_base = OTHER; note = beta-D-oxy locked nucleotide with phosphorothioate linkage
  modified_base 13: mod_base = OTHER; note = 5-methyl beta-D-oxy locked nucleotide with phosphorothioate linkage
  modified_base 14: mod_base = OTHER; note = beta-D-oxy locked nucleotide with phosphorothioate linkage
  modified_base 15: mod_base = OTHER; note = beta-D-oxy locked nucleotide with phosphorothioate linkage
aacactcgaacacga

SEQ ID NO: 465 - DNA, 15 bp, synthetic construct
  source 1..15: mol_type = other DNA
  modified_base 1: mod_base = OTHER; note = 5-methyl beta-D-oxy locked nucleotide with phosphorothioate linkage
  modified_base 2: mod_base = OTHER; note = 5-methyl beta-D-oxy locked nucleotide with phosphorothioate linkage
  modified_base 3: mod_base = OTHER; note = Nucleotide with phosphorothioate linkage
  modified_base 4: mod_base = OTHER; note = Nucleotide with phosphorothioate linkage
  modified_base 5: mod_base = OTHER; note = Nucleotide with phosphorothioate linkage
  modified_base 6: mod_base = OTHER; note = Nucleotide with phosphorothioate linkage
  modified_base 7: mod_base = OTHER; note = Nucleotide with phosphorothioate linkage
  modified_base 8: mod_base = OTHER; note = Nucleotide with phosphorothioate linkage
  modified_base 9: mod_base = OTHER; note = Nucleotide with phosphorothioate linkage
  modified_base 10: mod_base = OTHER; note = Nucleotide with phosphorothioate linkage
  modified_base 11: mod_base = OTHER; note = Nucleotide with phosphorothioate linkage
  modified_base 12: mod_base = OTHER; note = Nucleotide with phosphorothioate linkage
  modified_base 13: mod_base = OTHER; note = Nucleotide with phosphorothioate linkage
  modified_base 14: mod_base = OTHER; note = beta-D-oxy locked nucleotide with phosphorothioate linkage
  modified_base 15: mod_base = OTHER; note = 5-methyl beta-D-oxy locked nucleotide with phosphorothioate linkage
cccctacggtctcac

SEQ ID NO: 466 - DNA, 16 bp, synthetic construct
  source 1..16: mol_type = other DNA
  modified_base 1: mod_base = OTHER; note = beta-D-oxy locked nucleotide with phosphorothioate linkage
  modified_base 2: mod_base = OTHER; note = 5-methyl beta-D-oxy locked nucleotide with phosphorothioate linkage
  modified_base 3: mod_base = OTHER; note = Nucleotide with phosphorothioate linkage
  modified_base 4: mod_base = OTHER; note = Nucleotide with phosphorothioate linkage
  modified_base 5: mod_base = OTHER; note = Nucleotide with phosphorothioate linkage
  modified_base 6: mod_base = OTHER; note = Nucleotide with phosphorothioate linkage
  modified_base 7: mod_base = OTHER; note = Nucleotide with phosphorothioate linkage
  modified_base 8: mod_base = OTHER; note = Nucleotide with phosphorothioate linkage
  modified_base 9: mod_base = OTHER; note = Nucleotide with phosphorothioate linkage
  modified_base 10: mod_base = OTHER; note = Nucleotide with phosphorothioate linkage
  modified_base 11: mod_base = OTHER; note = Nucleotide with phosphorothioate linkage
  modified_base 12: mod_base = OTHER; note = Nucleotide with phosphorothioate linkage
  modified_base 13: mod_base = OTHER; note = Nucleotide with phosphorothioate linkage
  modified_base 14: mod_base = OTHER; note = Nucleotide with phosphorothioate linkage
  modified_base 15: mod_base = OTHER; note = beta-D-oxy locked nucleotide with phosphorothioate linkage
  modified_base 16: mod_base = OTHER; note = 5-methyl beta-D-oxy locked nucleotide with phosphorothioate linkage
tcccctacggtctcac

SEQ ID NO: 467 - DNA, 17 bp, synthetic construct
  source 1..17: mol_type = other DNA
  modified_base 1: mod_base = OTHER; note = beta-D-oxy locked nucleotide with phosphorothioate linkage
  modified_base 2: mod_base = OTHER; note = 5-methyl beta-D-oxy locked nucleotide with phosphorothioate linkage
  modified_base 3: mod_base = OTHER; note = Nucleotide with phosphorothioate linkage
  modified_base 4: mod_base = OTHER; note = Nucleotide with phosphorothioate linkage
  modified_base 5: mod_base = OTHER; note = Nucleotide with phosphorothioate linkage
  modified_base 6: mod_base = OTHER; note = Nucleotide with phosphorothioate linkage
  modified_base 7: mod_base = OTHER; note = Nucleotide with phosphorothioate linkage
  modified_base 8: mod_base = OTHER; note = Nucleotide with phosphorothioate linkage
  modified_base 9: mod_base = OTHER; note = Nucleotide with phosphorothioate linkage
  modified_base 10: mod_base = OTHER; note = Nucleotide with phosphorothioate linkage
  modified_base 11: mod_base = OTHER; note = Nucleotide with phosphorothioate linkage
  modified_base 12: mod_base = OTHER; note = Nucleotide with phosphorothioate linkage
  modified_base 13: mod_base = OTHER; note = Nucleotide with phosphorothioate linkage
  modified_base 14: mod_base = OTHER; note = Nucleotide with phosphorothioate linkage
  modified_base 15: mod_base = OTHER; note = Nucleotide with phosphorothioate linkage
  modified_base 16: mod_base = OTHER; note = 5-methyl beta-D-oxy locked nucleotide with phosphorothioate linkage
  modified_base 17: mod_base = OTHER; note = 5-methyl beta-D-oxy locked nucleotide with phosphorothioate linkage
tcacatggacactcacc

SEQ ID NO: 468 - DNA, 16 bp, synthetic construct
  source 1..16: mol_type = other DNA
  modified_base 1: mod_base = OTHER; note = beta-D-oxy locked nucleotide with phosphorothioate linkage
  modified_base 2: mod_base = OTHER; note = beta-D-oxy locked nucleotide with phosphorothioate linkage
  modified_base 3: mod_base = OTHER; note = beta-D-oxy locked nucleotide with phosphorothioate linkage
  modified_base 4: mod_base = OTHER; note = beta-D-oxy locked nucleotide with phosphorothioate linkage
  modified_base 5: mod_base = OTHER; note = Nucleotide with phosphorothioate linkage
  modified_base 6: mod_base = OTHER; note = Nucleotide with phosphorothioate linkage
  modified_base 7: mod_base = OTHER; note = Nucleotide with phosphorothioate linkage
  modified_base 8: mod_base = OTHER; note = Nucleotide with phosphorothioate linkage
  modified_base 9: mod_base = OTHER; note = Nucleotide with phosphorothioate linkage
  modified_base 10: mod_base = OTHER; note = Nucleotide with phosphorothioate linkage
  modified_base 11: mod_base = OTHER; note = Nucleotide with phosphorothioate linkage
  modified_base 12: mod_base = OTHER; note = Nucleotide with phosphorothioate linkage
  modified_base 13: mod_base = OTHER; note = Nucleotide with phosphorothioate linkage
  modified_base 14: mod_base = OTHER; note = 5-methyl beta-D-oxy locked nucleotide with phosphorothioate linkage
  modified_base 15: mod_base = OTHER; note = 5-methyl beta-D-oxy locked nucleotide with phosphorothioate linkage
  modified_base 16: mod_base = OTHER; note = beta-D-oxy locked nucleotide with phosphorothioate linkage
attgtaagtttatcca

SEQ ID NO: 469 - DNA, 16 bp, synthetic construct
  source 1..16: mol_type = other DNA
  modified_base 1: mod_base = OTHER; note = 5-methyl beta-D-oxy locked nucleotide with phosphorothioate linkage
  modified_base 2: mod_base = OTHER; note = beta-D-oxy locked nucleotide with phosphorothioate linkage
  modified_base 3: mod_base = OTHER; note = beta-D-oxy locked nucleotide with phosphorothioate linkage
  modified_base 4: mod_base = OTHER; note = beta-D-oxy locked nucleotide with phosphorothioate linkage
  modified_base 5: mod_base = OTHER; note = Nucleotide with phosphorothioate linkage
  modified_base 6: mod_base = OTHER; note = Nucleotide with phosphorothioate linkage
  modified_base 7: mod_base = OTHER; note = Nucleotide with phosphorothioate linkage
  modified_base 8: mod_base = OTHER; note = Nucleotide with phosphorothioate linkage
  modified_base 9: mod_base = OTHER; note = Nucleotide with phosphorothioate linkage
  modified_base 10: mod_base = OTHER; note = Nucleotide with phosphorothioate linkage
  modified_base 11: mod_base = OTHER; note = Nucleotide with phosphorothioate linkage
  modified_base 12: mod_base = OTHER; note = Nucleotide with phosphorothioate linkage
  modified_base 13: mod_base = OTHER; note = beta-D-oxy locked nucleotide with phosphorothioate linkage
  modified_base 14: mod_base = OTHER; note = beta-D-oxy locked nucleotide with phosphorothioate linkage
  modified_base 15: mod_base = OTHER; note = beta-D-oxy locked nucleotide with phosphorothioate linkage
  modified_base 16: mod_base = OTHER; note = beta-D-oxy locked nucleotide with phosphorothioate linkage
caattgagtcacaata

SEQ ID NO: 470 - DNA, 18 bp, synthetic construct
  source 1..18: mol_type = other DNA
  modified_base 1: mod_base = OTHER; note = 5-methyl beta-D-oxy locked nucleotide with phosphorothioate linkage
  modified_base 2: mod_base = OTHER; note = beta-D-oxy locked nucleotide with phosphorothioate linkage
  modified_base 3: mod_base = OTHER; note = 5-methyl beta-D-oxy locked nucleotide with phosphorothioate linkage
  modified_base 4: mod_base = OTHER; note = beta-D-oxy locked nucleotide with phosphorothioate linkage
  modified_base 5: mod_base = OTHER; note = Nucleotide with phosphorothioate linkage
  modified_base 6: mod_base = OTHER; note = Nucleotide with phosphorothioate linkage
  modified_base 7: mod_base = OTHER; note = Nucleotide with phosphorothioate linkage
  modified_base 8: mod_base = OTHER; note = Nucleotide with phosphorothioate linkage
  modified_base 9: mod_base = OTHER; note = Nucleotide with phosphorothioate linkage
  modified_base 10: mod_base = OTHER; note = Nucleotide with phosphorothioate linkage
  modified_base 11: mod_base = OTHER; note = Nucleotide with phosphorothioate linkage
  modified_base 12: mod_base = OTHER; note = Nucleotide with phosphorothioate linkage
  modified_base 13: mod_base = OTHER; note = Nucleotide with phosphorothioate linkage
  modified_base 14: mod_base = OTHER; note = Nucleotide with phosphorothioate linkage
  modified_base 15: mod_base = OTHER; note = beta-D-oxy locked nucleotide with phosphorothioate linkage
  modified_base 16: mod_base = OTHER; note = 5-methyl beta-D-oxy locked nucleotide with phosphorothioate linkage
  modified_base 17: mod_base = OTHER; note = beta-D-oxy locked nucleotide with phosphorothioate linkage
  modified_base 18: mod_base = OTHER; note = beta-D-oxy locked nucleotide with phosphorothioate linkage
ctcaatataagtaaacaa

SEQ ID NO: 471 - DNA, 17 bp, synthetic construct
  source 1..17: mol_type = other DNA
  modified_base 1: mod_base = OTHER; note = beta-D-oxy locked nucleotide with phosphorothioate linkage
  modified_base 2: mod_base = OTHER; note = 5-methyl beta-D-oxy locked nucleotide with phosphorothioate linkage
  modified_base 3: mod_base = OTHER; note = Nucleotide with phosphorothioate linkage
  modified_base 4: mod_base = OTHER; note = Nucleotide with phosphorothioate linkage
  modified_base 5: mod_base = OTHER; note = Nucleotide with phosphorothioate linkage
  modified_base 6: mod_base = OTHER; note = Nucleotide with phosphorothioate linkage
  modified_base 7: mod_base = OTHER; note = Nucleotide with phosphorothioate linkage
  modified_base 8: mod_base = OTHER; note = Nucleotide with phosphorothioate linkage
  modified_base 9: mod_base = OTHER; note = Nucleotide with phosphorothioate linkage
  modified_base 10: mod_base = OTHER; note = Nucleotide with phosphorothioate linkage
  modified_base 11: mod_base = OTHER; note = Nucleotide with phosphorothioate linkage
  modified_base 12: mod_base = OTHER; note = Nucleotide with phosphorothioate linkage
  modified_base 13: mod_base = OTHER; note = Nucleotide with phosphorothioate linkage
  modified_base 14: mod_base = OTHER; note = Nucleotide with phosphorothioate linkage
  modified_base 15: mod_base = OTHER; note = Nucleotide with phosphorothioate linkage
  modified_base 16: mod_base = OTHER; note = beta-D-oxy locked nucleotide with phosphorothioate linkage
  modified_base 17: mod_base = OTHER; note = beta-D-oxy locked nucleotide with phosphorothioate linkage
gcctctgtctcaatata

SEQ ID NO: 472 - DNA, 17 bp, synthetic construct
  source 1..17: mol_type = other DNA
  modified_base 1: mod_base = OTHER; note = beta-D-oxy locked nucleotide with phosphorothioate linkage
  modified_base 2: mod_base = OTHER; note = beta-D-oxy locked nucleotide with phosphorothioate linkage
  modified_base 3: mod_base = OTHER; note = beta-D-oxy locked nucleotide with phosphorothioate linkage
  modified_base 4: mod_base = OTHER; note = 5-methyl beta-D-oxy locked nucleotide with phosphorothioate linkage
  modified_base 5: mod_base = OTHER; note = Nucleotide with phosphorothioate linkage
  modified_base 6: mod_base = OTHER; note = Nucleotide with phosphorothioate linkage
  modified_base 7: mod_base = OTHER; note = Nucleotide with phosphorothioate linkage
  modified_base 8: mod_base = OTHER; note = Nucleotide with phosphorothioate linkage
  modified_base 9: mod_base = OTHER; note = Nucleotide with phosphorothioate linkage
  modified_base 10: mod_base = OTHER; note = Nucleotide with phosphorothioate linkage
  modified_base 11: mod_base = OTHER; note = Nucleotide with phosphorothioate linkage
  modified_base 12: mod_base = OTHER; note = Nucleotide with phosphorothioate linkage
  modified_base 13: mod_base = OTHER; note = Nucleotide with phosphorothioate linkage
  modified_base 14: mod_base = OTHER; note = 5-methyl beta-D-oxy locked nucleotide with phosphorothioate linkage
  modified_base 15: mod_base = OTHER; note = beta-D-oxy locked nucleotide with phosphorothioate linkage
  modified_base 16: mod_base = OTHER; note = beta-D-oxy locked nucleotide with phosphorothioate linkage
  modified_base 17: mod_base = OTHER; note = beta-D-oxy locked nucleotide with phosphorothioate linkage
agactagtaattccaaa

SEQ ID NO: 473 - DNA, 17 bp, synthetic construct
  source 1..17: mol_type = other DNA
  modified_base 1: mod_base = OTHER; note = beta-D-oxy locked nucleotide with phosphorothioate linkage
  modified_base 2: mod_base = OTHER; note = beta-D-oxy locked nucleotide with phosphorothioate linkage
  modified_base 3: mod_base = OTHER; note = 5-methyl beta-D-oxy locked nucleotide with phosphorothioate linkage
  modified_base 4: mod_base = OTHER; note = Nucleotide with phosphorothioate linkage
  modified_base 5: mod_base = OTHER; note = Nucleotide with phosphorothioate linkage
  modified_base 6: mod_base = OTHER; note = Nucleotide with phosphorothioate linkage
  modified_base 7: mod_base = OTHER; note = Nucleotide with phosphorothioate linkage
  modified_base 8: mod_base = OTHER; note = Nucleotide with phosphorothioate linkage
  modified_base 9: mod_base = OTHER; note = Nucleotide with phosphorothioate linkage
  modified_base 10: mod_base = OTHER; note = Nucleotide with phosphorothioate linkage
  modified_base 11: mod_base = OTHER; note = Nucleotide with phosphorothioate linkage
  modified_base 12: mod_base = OTHER; note = Nucleotide with phosphorothioate linkage
  modified_base 13: mod_base = OTHER; note = Nucleotide with phosphorothioate linkage
  modified_base 14: mod_base = OTHER; note = Nucleotide with phosphorothioate linkage
  modified_base 15: mod_base = OTHER; note = 5-methyl beta-D-oxy locked nucleotide with phosphorothioate linkage
  modified_base 16: mod_base = OTHER; note = beta-D-oxy locked nucleotide with phosphorothioate linkage
  modified_base 17: mod_base = OTHER; note = beta-D-oxy locked nucleotide with phosphorothioate linkage
ttctctaccatgtacaa

SEQ ID NO: 474 - DNA, 17 bp, synthetic construct
  source 1..17: mol_type = other DNA
  modified_base 1: mod_base = OTHER; note = 5-methyl beta-D-oxy locked nucleotide with phosphorothioate linkage
  modified_base 2: mod_base = OTHER; note = beta-D-oxy locked nucleotide with phosphorothioate linkage
  modified_base 3: mod_base = OTHER; note = Nucleotide with phosphorothioate linkage
  modified_base 4: mod_base = OTHER; note = Nucleotide with phosphorothioate linkage
  modified_base 5: mod_base = OTHER; note = Nucleotide with phosphorothioate linkage
  modified_base 6: mod_base = OTHER; note = Nucleotide with phosphorothioate linkage
  modified_base 7: mod_base = OTHER; note = Nucleotide with phosphorothioate linkage
  modified_base 8: mod_base = OTHER; note = Nucleotide with phosphorothioate linkage
  modified_base 9: mod_base = OTHER; note = Nucleotide with phosphorothioate linkage
  modified_base 10: mod_base = OTHER; note = Nucleotide with phosphorothioate linkage
  modified_base 11: mod_base = OTHER; note = Nucleotide with phosphorothioate linkage
  modified_base 12: mod_base = OTHER; note = Nucleotide with phosphorothioate linkage
  modified_base 13: mod_base = OTHER; note = Nucleotide with phosphorothioate linkage
  modified_base 14: mod_base = OTHER; note = Nucleotide with phosphorothioate linkage
  modified_base 15: mod_base = OTHER; note = beta-D-oxy locked nucleotide with phosphorothioate linkage
  modified_base 16: mod_base = OTHER; note = beta-D-oxy locked nucleotide with phosphorothioate linkage
  modified_base 17: mod_base = OTHER; note = beta-D-oxy locked nucleotide with phosphorothioate linkage
cttaacccagaaccttt

SEQ ID NO: 475 - DNA, 17 bp, synthetic construct
  source 1..17: mol_type = other DNA
  modified_base 1: mod_base = OTHER; note = 5-methyl beta-D-oxy locked nucleotide with phosphorothioate linkage
  modified_base 2: mod_base = OTHER; note = 5-methyl beta-D-oxy locked nucleotide with phosphorothioate linkage
  modified_base 3: mod_base = OTHER; note = Nucleotide with phosphorothioate linkage
  modified_base 4: mod_base = OTHER; note = Nucleotide with phosphorothioate linkage
  modified_base 5: mod_base = OTHER; note = Nucleotide with phosphorothioate linkage
  modified_base 6: mod_base = OTHER; note = Nucleotide with phosphorothioate linkage
  modified_base 7: mod_base = OTHER; note = Nucleotide with phosphorothioate linkage
  modified_base 8: mod_base = OTHER; note = Nucleotide with phosphorothioate linkage
  modified_base 9: mod_base = OTHER; note = Nucleotide with phosphorothioate linkage
  modified_base 10: mod_base = OTHER; note = Nucleotide with phosphorothioate linkage
  modified_base 11: mod_base = OTHER; note = Nucleotide with phosphorothioate linkage
  modified_base 12: mod_base = OTHER; note = Nucleotide with phosphorothioate linkage
  modified_base 13: mod_base = OTHER; note = Nucleotide with phosphorothioate linkage
  modified_base 14: mod_base = OTHER; note = Nucleotide with phosphorothioate linkage
  modified_base 15: mod_base = OTHER; note = Nucleotide with phosphorothioate linkage
  modified_base 16: mod_base = OTHER; note = beta-D-oxy locked nucleotide with phosphorothioate linkage
  modified_base 17: mod_base = OTHER; note = beta-D-oxy locked nucleotide with phosphorothioate linkage
ccttaacccagaacctt

SEQ ID NO: 476 - DNA, 17 bp, synthetic construct
  source 1..17: mol_type = other DNA
  modified_base 1: mod_base = OTHER; note = beta-D-oxy locked nucleotide with phosphorothioate linkage
  modified_base 2: mod_base = OTHER; note = beta-D-oxy locked nucleotide with phosphorothioate linkage
  modified_base 3: mod_base = OTHER; note = 5-methyl beta-D-oxy locked nucleotide with phosphorothioate linkage
  modified_base 4: mod_base = OTHER; note = Nucleotide with phosphorothioate linkage
  modified_base 5: mod_base = OTHER; note = Nucleotide with phosphorothioate linkage
  modified_base 6: mod_base = OTHER; note = Nucleotide with phosphorothioate linkage
  modified_base 7: mod_base = OTHER; note = Nucleotide with phosphorothioate linkage
  modified_base 8: mod_base = OTHER; note = Nucleotide with phosphorothioate linkage
  modified_base 9: mod_base = OTHER; note = Nucleotide with phosphorothioate linkage
  modified_base 10: mod_base = OTHER; note = Nucleotide with phosphorothioate linkage
  modified_base 11: mod_base = OTHER; note = Nucleotide with phosphorothioate linkage
  modified_base 12: mod_base = OTHER; note = Nucleotide with phosphorothioate linkage
  modified_base 13: mod_base = OTHER; note = Nucleotide with phosphorothioate linkage
  modified_base 14: mod_base = OTHER; note = Nucleotide with phosphorothioate linkage
  modified_base 15: mod_base = OTHER; note = Nucleotide with phosphorothioate linkage
  modified_base 16: mod_base = OTHER; note = beta-D-oxy locked nucleotide with phosphorothioate linkage
  modified_base 17: mod_base = OTHER; note = 5-methyl beta-D-oxy locked nucleotide with phosphorothioate linkage
ttcccttaacccagaac

SEQ ID NO: 477 - DNA, 16 bp, synthetic construct
  source 1..16: mol_type = other DNA
  modified_base 1: mod_base = OTHER; note = 5-methyl beta-D-oxy locked nucleotide with phosphorothioate linkage
  modified_base 2: mod_base = OTHER; note = beta-D-oxy locked nucleotide with phosphorothioate linkage
  modified_base 3: mod_base = OTHER; note = beta-D-oxy locked nucleotide with phosphorothioate linkage
  modified_base 4: mod_base = OTHER; note = Nucleotide with phosphorothioate linkage
  modified_base 5: mod_base = OTHER; note = Nucleotide with phosphorothioate linkage
  modified_base 6: mod_base = OTHER; note = Nucleotide with phosphorothioate linkage
  modified_base 7: mod_base = OTHER; note = Nucleotide with phosphorothioate linkage
  modified_base 8: mod_base = OTHER; note = Nucleotide with phosphorothioate linkage
  modified_base 9: mod_base = OTHER; note = Nucleotide with phosphorothioate linkage
  modified_base 10: mod_base = OTHER; note = Nucleotide with phosphorothioate linkage
  modified_base 11: mod_base = OTHER; note = Nucleotide with phosphorothioate linkage
  modified_base 12: mod_base = OTHER; note = Nucleotide with phosphorothioate linkage
  modified_base 13: mod_base = OTHER; note = Nucleotide with phosphorothioate linkage
  modified_base 14: mod_base = OTHER; note = Nucleotide with phosphorothioate linkage
  modified_base 15: mod_base = OTHER; note = beta-D-oxy locked nucleotide with phosphorothioate linkage
  modified_base 16: mod_base = OTHER; note = 5-methyl beta-D-oxy locked nucleotide with phosphorothioate linkage
caaggttcctactctc

SEQ ID NO: 478 - DNA, 18 bp, synthetic construct
  source 1..18: mol_type = other DNA
  modified_base 1: mod_base = OTHER; note = 5-methyl beta-D-oxy locked nucleotide with phosphorothioate linkage
  modified_base 2: mod_base = OTHER; note = 5-methyl beta-D-oxy locked nucleotide with phosphorothioate linkage
  modified_base 3: mod_base = OTHER; note = Nucleotide with phosphorothioate linkage
  modified_base 4: mod_base = OTHER; note = Nucleotide with phosphorothioate linkage
  modified_base 5: mod_base = OTHER; note = Nucleotide with phosphorothioate linkage
  modified_base 6: mod_base = OTHER; note = Nucleotide with phosphorothioate linkage
  modified_base 7: mod_base = OTHER; note = Nucleotide with phosphorothioate linkage
  modified_base 8: mod_base = OTHER; note = Nucleotide with phosphorothioate linkage
  modified_base 9: mod_base = OTHER; note = Nucleotide with phosphorothioate linkage
  modified_base 10: mod_base = OTHER; note = Nucleotide with phosphorothioate linkage
  modified_base 11: mod_base = OTHER; note = Nucleotide with phosphorothioate linkage
  modified_base 12: mod_base = OTHER; note = Nucleotide with phosphorothioate linkage
  modified_base 13: mod_base = OTHER; note = Nucleotide with phosphorothioate linkage
  modified_base 14: mod_base = OTHER; note = Nucleotide with phosphorothioate linkage
  modified_base 15: mod_base = OTHER; note = Nucleotide with phosphorothioate linkage
  modified_base 16: mod_base = OTHER; note = Nucleotide with phosphorothioate linkage
  modified_base 17: mod_base = OTHER; note = 5-methyl beta-D-oxy locked nucleotide with phosphorothioate linkage
  modified_base 18: mod_base = OTHER; note = beta-D-oxy locked nucleotide with phosphorothioate linkage
ccaaactcagaatcttca

SEQ ID NO: 479 - DNA, 16 bp, synthetic construct
  source 1..16: mol_type = other DNA
  modified_base 1: mod_base = OTHER; note = beta-D-oxy locked nucleotide with phosphorothioate linkage
  modified_base 2: mod_base = OTHER; note = beta-D-oxy locked nucleotide with phosphorothioate linkage
  modified_base 3: mod_base = OTHER; note = Nucleotide with phosphorothioate linkage
  modified_base 4: mod_base = OTHER; note = Nucleotide with phosphorothioate linkage
  modified_base 5: mod_base = OTHER; note = Nucleotide with phosphorothioate linkage
  modified_base 6: mod_base = OTHER; note = Nucleotide with phosphorothioate linkage
  modified_base 7: mod_base = OTHER; note = Nucleotide with phosphorothioate linkage
  modified_base 8: mod_base = OTHER; note = Nucleotide with phosphorothioate linkage
  modified_base 9: mod_base = OTHER; note = Nucleotide with phosphorothioate linkage
  modified_base 10: mod_base = OTHER; note = Nucleotide with phosphorothioate linkage
  modified_base 11: mod_base = OTHER; note = Nucleotide with phosphorothioate linkage
  modified_base 12: mod_base = OTHER; note = Nucleotide with phosphorothioate linkage
  modified_base 13: mod_base = OTHER; note = Nucleotide with phosphorothioate linkage
  modified_base 14: mod_base = OTHER; note = 5-methyl beta-D-oxy locked nucleotide with phosphorothioate linkage
  modified_base 15: mod_base = OTHER; note = beta-D-oxy locked nucleotide with phosphorothioate linkage
  modified_base 16: mod_base = OTHER; note = 5-methyl beta-D-oxy locked nucleotide with phosphorothioate linkage
tgctgacatcctacac

SEQ ID NO: 480 - DNA, 17 bp, synthetic construct
  source 1..17: mol_type = other DNA
  modified_base 1: mod_base = OTHER; note = 5-methyl beta-D-oxy locked nucleotide with phosphorothioate linkage
  modified_base 2: mod_base = OTHER; note = beta-D-oxy locked nucleotide with phosphorothioate linkage
  modified_base 3: mod_base = OTHER; note = Nucleotide with phosphorothioate linkage
  modified_base 4: mod_base = OTHER; note = Nucleotide with phosphorothioate linkage
  modified_base 5: mod_base = OTHER; note = Nucleotide with phosphorothioate linkage
  modified_base 6: mod_base = OTHER; note = Nucleotide with phosphorothioate linkage
  modified_base 7: mod_base = OTHER; note = Nucleotide with phosphorothioate linkage
  modified_base 8: mod_base = OTHER; note = Nucleotide with phosphorothioate linkage
  modified_base 9: mod_base = OTHER; note = Nucleotide with phosphorothioate linkage
  modified_base 10: mod_base = OTHER; note = Nucleotide with phosphorothioate linkage
  modified_base 11: mod_base = OTHER; note = Nucleotide with phosphorothioate linkage
  modified_base 12: mod_base = OTHER; note = Nucleotide with phosphorothioate linkage
  modified_base 13: mod_base = OTHER; note = Nucleotide with phosphorothioate linkage
  modified_base 14: mod_base = OTHER; note = Nucleotide with phosphorothioate linkage
  modified_base 15: mod_base = OTHER; note = Nucleotide with phosphorothioate linkage
  modified_base 16: mod_base = OTHER; note = beta-D-oxy locked nucleotide with phosphorothioate linkage
  modified_base 17: mod_base = OTHER; note = 5-methyl beta-D-oxy locked nucleotide with phosphorothioate linkage
ctgctgacatcctacac

SEQ ID NO: 481 - DNA, 17 bp, synthetic construct
  source 1..17: mol_type = other DNA
  modified_base 1: mod_base = OTHER; note = 5-methyl beta-D-oxy locked nucleotide with phosphorothioate linkage
  modified_base 2: mod_base = OTHER; note = beta-D-oxy locked nucleotide with phosphorothioate linkage
  modified_base 3: mod_base = OTHER; note = Nucleotide with phosphorothioate linkage
  modified_base 4: mod_base = OTHER; note = Nucleotide with phosphorothioate linkage
  modified_base 5: mod_base = OTHER; note = Nucleotide with phosphorothioate linkage
  modified_base 6: mod_base = OTHER; note = Nucleotide with phosphorothioate linkage
  modified_base 7: mod_base = OTHER; note = Nucleotide with phosphorothioate linkage
  modified_base 8: mod_base = OTHER; note = Nucleotide with phosphorothioate linkage
  modified_base 9: mod_base = OTHER; note = Nucleotide with phosphorothioate linkage
  modified_base 10: mod_base = OTHER; note = Nucleotide with phosphorothioate linkage
  modified_base 11: mod_base = OTHER; note = Nucleotide with phosphorothioate linkage
  modified_base 12: mod_base = OTHER; note = Nucleotide with phosphorothioate linkage
  modified_base 13: mod_base = OTHER; note = Nucleotide with phosphorothioate linkage
  modified_base 14: mod_base = OTHER; note = Nucleotide with phosphorothioate linkage
  modified_base 15: mod_base = OTHER; note = Nucleotide with phosphorothioate linkage
  modified_base 16: mod_base = OTHER; note = beta-D-oxy locked nucleotide with phosphorothioate linkage
  modified_base 17: mod_base = OTHER; note = 5-methyl beta-D-oxy locked nucleotide with phosphorothioate linkage
cacggcttccttaccac

SEQ ID NO: 482 - DNA, 16 bp, synthetic construct
  source 1..16: mol_type = other DNA
  modified_base 1: mod_base = OTHER; note = 5-methyl beta-D-oxy locked nucleotide with phosphorothioate linkage
  modified_base 2: mod_base = OTHER; note = beta-D-oxy locked nucleotide with phosphorothioate linkage
  modified_base 3: mod_base = OTHER; note = Nucleotide with phosphorothioate linkage
  modified_base 4: mod_base = OTHER; note = Nucleotide with phosphorothioate linkage
  modified_base 5: mod_base = OTHER; note = Nucleotide with phosphorothioate linkage
  modified_base 6: mod_base = OTHER; note = Nucleotide with phosphorothioate linkage
  modified_base 7: mod_base = OTHER; note = Nucleotide with phosphorothioate linkage
  modified_base 8: mod_base = OTHER; note = Nucleotide with phosphorothioate linkage
  modified_base 9: mod_base = OTHER; note = Nucleotide with phosphorothioate linkage
  modified_base 10: mod_base = OTHER; note = Nucleotide with phosphorothioate linkage
  modified_base 11: mod_base = OTHER; note = Nucleotide with phosphorothioate linkage
  modified_base 12: mod_base = OTHER; note = Nucleotide with phosphorothioate linkage
  modified_base 13: mod_base = OTHER; note = Nucleotide with phosphorothioate linkage
  modified_base 14: mod_base = OTHER; note = Nucleotide with phosphorothioate linkage
  modified_base 15: mod_base = OTHER; note = 5-methyl beta-D-oxy locked nucleotide with phosphorothioate linkage
  modified_base 16: mod_base = OTHER; note = beta-D-oxy locked nucleotide with phosphorothioate linkage
cacggcttccttacca

SEQ ID NO: 483 - DNA, 17 bp, synthetic construct
  source 1..17: mol_type = other DNA
  modified_base 1: mod_base = OTHER; note = 5-methyl beta-D-oxy locked nucleotide with phosphorothioate linkage
  modified_base 2: mod_base = OTHER; note = beta-D-oxy locked nucleotide with phosphorothioate linkage
  modified_base 3: mod_base = OTHER; note = beta-D-oxy locked nucleotide with phosphorothioate linkage
  modified_base 4: mod_base = OTHER; note = Nucleotide with phosphorothioate linkage
  modified_base 5: mod_base = OTHER; note = Nucleotide with phosphorothioate linkage
  modified_base 6: mod_base = OTHER; note = Nucleotide with phosphorothioate linkage
  modified_base 7: mod_base = OTHER; note = Nucleotide with phosphorothioate linkage
  modified_base 8: mod_base = OTHER; note = Nucleotide with phosphorothioate linkage
  modified_base 9: mod_base = OTHER; note = Nucleotide with phosphorothioate linkage
  modified_base 10: mod_base = OTHER; note = Nucleotide with phosphorothioate linkage
  modified_base 11: mod_base = OTHER; note = Nucleotide with phosphorothioate linkage
  modified_base 12: mod_base = OTHER; note = Nucleotide with phosphorothioate linkage
  modified_base 13: mod_base = OTHER; note = Nucleotide with phosphorothioate linkage
  modified_base 14: mod_base = OTHER; note = Nucleotide with phosphorothioate linkage
  modified_base 15: mod_base = OTHER; note = Nucleotide with phosphorothioate linkage
  modified_base 16: mod_base = OTHER; note = 5-methyl beta-D-oxy locked nucleotide with phosphorothioate linkage
  modified_base 17: mod_base = OTHER; note = beta-D-oxy locked nucleotide with phosphorothioate linkage
caacacaactttgtcct

SEQ ID NO: 484 - DNA, 16 bp, synthetic construct
  source 1..16: mol_type = other DNA
  modified_base 1: mod_base = OTHER; note = beta-D-oxy locked nucleotide with phosphorothioate linkage
  modified_base 2: mod_base = OTHER; note = beta-D-oxy locked nucleotide with phosphorothioate linkage
  modified_base 3: mod_base = OTHER; note = Nucleotide with phosphorothioate linkage
  modified_base 4: mod_base = OTHER; note = Nucleotide with phosphorothioate linkage
  modified_base 5: mod_base = OTHER; note = Nucleotide with phosphorothioate linkage
  modified_base 6: mod_base = OTHER; note = Nucleotide with phosphorothioate linkage
  modified_base 7: mod_base = OTHER; note = Nucleotide with phosphorothioate linkage
  modified_base 8: mod_base = OTHER; note = Nucleotide with phosphorothioate linkage
  modified_base 9: mod_base = OTHER; note = Nucleotide with phosphorothioate linkage
  modified_base 10: mod_base = OTHER; note = Nucleotide with phosphorothioate linkage
  modified_base 11: mod_base = OTHER; note = Nucleotide with phosphorothioate linkage
  modified_base 12: mod_base = OTHER; note = Nucleotide with phosphorothioate linkage
  modified_base 13: mod_base = OTHER; note = Nucleotide with phosphorothioate linkage
  modified_base 14: mod_base = OTHER; note = Nucleotide with phosphorothioate linkage
  modified_base 15: mod_base = OTHER; note = 5-methyl beta-D-oxy locked nucleotide with phosphorothioate linkage
  modified_base 16: mod_base = OTHER; note = 5-methyl beta-D-oxy locked nucleotide with phosphorothioate linkage
aataccccagcaaccc

SEQ ID NO: 485 - DNA, 16 bp, synthetic construct
  source 1..16: mol_type = other DNA
  modified_base 1: mod_base = OTHER; note = 5-methyl beta-D-oxy locked nucleotide with phosphorothioate linkage
  modified_base 2: mod_base = OTHER; note = beta-D-oxy locked nucleotide with phosphorothioate linkage
  modified_base 3: mod_base = OTHER; note = Nucleotide with phosphorothioate linkage
  modified_base 4: mod_base = OTHER; note = Nucleotide with phosphorothioate linkage
  modified_base 5: mod_base = OTHER; note = Nucleotide with phosphorothioate linkage
  modified_base 6: mod_base = OTHER; note = Nucleotide with phosphorothioate linkage
  modified_base 7: mod_base = OTHER; note = Nucleotide with phosphorothioate linkage
  modified_base 8: mod_base = OTHER; note = Nucleotide with phosphorothioate linkage
  modified_base 9: mod_base = OTHER; note = Nucleotide with phosphorothioate linkage
  modified_base 10: mod_base = OTHER; note = Nucleotide with phosphorothioate linkage
  modified_base 11: mod_base = OTHER; note = Nucleotide with phosphorothioate linkage
  modified_base 12: mod_base = OTHER; note = Nucleotide with phosphorothioate linkage
  modified_base 13: mod_base = OTHER; note = Nucleotide with phosphorothioate linkage
  modified_base 14: mod_base = OTHER; note = Nucleotide with phosphorothioate linkage
  modified_base 15: mod_base = OTHER; note = 5-methyl beta-D-oxy locked nucleotide with phosphorothioate linkage
  modified_base 16: mod_base = OTHER; note = 5-methyl beta-D-oxy locked nucleotide with phosphorothioate linkage
caataccccagcaacc

SEQ ID NO: 486 - DNA, 16 bp, synthetic construct
  source 1..16: mol_type = other DNA
  modified_base 1: mod_base = OTHER; note = 5-methyl beta-D-oxy locked nucleotide with phosphorothioate linkage
  modified_base 2: mod_base = OTHER; note = 5-methyl beta-D-oxy locked nucleotide with phosphorothioate linkage
  modified_base 3: mod_base = OTHER; note = Nucleotide with phosphorothioate linkage
  modified_base 4: mod_base = OTHER; note = Nucleotide with phosphorothioate linkage
  modified_base 5: mod_base = OTHER; note = Nucleotide with phosphorothioate linkage
  modified_base 6: mod_base = OTHER; note = Nucleotide with phosphorothioate linkage
  modified_base 7: mod_base = OTHER; note = Nucleotide with phosphorothioate linkage
  modified_base 8: mod_base = OTHER; note = Nucleotide with phosphorothioate linkage
  modified_base 9: mod_base = OTHER; note = Nucleotide with phosphorothioate linkage
  modified_base 10: mod_base = OTHER; note = Nucleotide with phosphorothioate linkage
  modified_base 11: mod_base = OTHER; note = Nucleotide with phosphorothioate linkage
  modified_base 12: mod_base = OTHER; note = Nucleotide with phosphorothioate linkage
  modified_base 13: mod_base = OTHER; note = Nucleotide with phosphorothioate linkage
  modified_base 14: mod_base = OTHER; note = Nucleotide with phosphorothioate linkage
  modified_base 15: mod_base = OTHER; note = beta-D-oxy locked nucleotide with phosphorothioate linkage
  modified_base 16: mod_base = OTHER; note = 5-methyl beta-D-oxy locked nucleotide with phosphorothioate linkage
ccaataccccagcaac

SEQ ID NO: 487 - DNA, 16 bp, synthetic construct
  source 1..16: mol_type = other DNA
  modified_base 1: mod_base = OTHER; note = 5-methyl beta-D-oxy locked nucleotide with phosphorothioate linkage
  modified_base 2: mod_base = OTHER; note = 5-methyl beta-D-oxy locked nucleotide with phosphorothioate linkage
  modified_base 3: mod_base = OTHER; note = Nucleotide with phosphorothioate linkage
  modified_base 4: mod_base = OTHER; note = Nucleotide with phosphorothioate linkage
  modified_base 5: mod_base = OTHER; note = Nucleotide with phosphorothioate linkage
  modified_base 6: mod_base = OTHER; note = Nucleotide with phosphorothioate linkage
  modified_base 7: mod_base = OTHER; note = Nucleotide with phosphorothioate linkage
  modified_base 8: mod_base = OTHER; note = Nucleotide with phosphorothioate linkage
  modified_base 9: mod_base = OTHER; note = Nucleotide with phosphorothioate linkage
  modified_base 10: mod_base = OTHER; note = Nucleotide with phosphorothioate linkage
  modified_base 11: mod_base = OTHER; note = Nucleotide with phosphorothioate linkage
  modified_base 12: mod_base = OTHER; note = Nucleotide with phosphorothioate linkage
  modified_base 13: mod_base = OTHER; note = Nucleotide with phosphorothioate linkage
  modified_base 14: mod_base = OTHER; note = Nucleotide with phosphorothioate linkage
  modified_base 15: mod_base = OTHER; note = beta-D-oxy locked nucleotide with phosphorothioate linkage
  modified_base 16: mod_base = OTHER; note = beta-D-oxy locked nucleotide with phosphorothioate linkage
cccaataccccagcaa

SEQ ID NO: 488 - DNA, 19 bp, synthetic construct
  source 1..19: mol_type = other DNA
  modified_base 1: mod_base = OTHER; note = beta-D-oxy locked nucleotide with phosphorothioate linkage
  modified_base 2: mod_base = OTHER; note = beta-D-oxy locked nucleotide with phosphorothioate linkage
  modified_base 3: mod_base = OTHER; note = 5-methyl beta-D-oxy locked nucleotide with phosphorothioate linkage
  modified_base 4: mod_base = OTHER; note = beta-D-oxy locked nucleotide with phosphorothioate linkage
  modified_base 5: mod_base = OTHER; note = Nucleotide with phosphorothioate linkage
  modified_base 6: mod_base = OTHER; note = Nucleotide with phosphorothioate linkage
  modified_base 7: mod_base = OTHER; note = Nucleotide with phosphorothioate linkage
  modified_base 8: mod_base = OTHER; note = Nucleotide with phosphorothioate linkage
  modified_base 9: mod_base = OTHER; note = Nucleotide with phosphorothioate linkage
  modified_base 10: mod_base = OTHER; note = Nucleotide with phosphorothioate linkage
  modified_base 11: mod_base = OTHER; note = Nucleotide with phosphorothioate linkage
  modified_base 12: mod_base = OTHER; note = Nucleotide with phosphorothioate linkage
  modified_base 13: mod_base = OTHER; note = Nucleotide with phosphorothioate linkage
  modified_base 14: mod_base = OTHER; note = Nucleotide with phosphorothioate linkage
  modified_base 15: mod_base = OTHER; note = Nucleotide with phosphorothioate linkage
  modified_base 16: mod_base = OTHER; note = beta-D-oxy locked nucleotide with phosphorothioate linkage
  modified_base 17: mod_base = OTHER; note = 5-methyl beta-D-oxy locked nucleotide with phosphorothioate linkage
  modified_base 18: mod_base = OTHER; note = beta-D-oxy locked nucleotide with phosphorothioate linkage
  modified_base 19: mod_base = OTHER; note = beta-D-oxy locked nucleotide with phosphorothioate linkage
aacaatgaaatatattcat

SEQ ID NO: 489 - DNA, 18 bp, synthetic construct
  source 1..18: mol_type = other DNA
  modified_base 1: mod_base = OTHER; note = beta-D-oxy locked nucleotide with phosphorothioate linkage
  modified_base 2: mod_base = OTHER; note = 5-methyl beta-D-oxy locked nucleotide with phosphorothioate linkage
  modified_base 3: mod_base = OTHER; note = beta-D-oxy locked nucleotide with phosphorothioate linkage
  modified_base 4: mod_base = OTHER; note = beta-D-oxy locked nucleotide with phosphorothioate linkage
  modified_base 5: mod_base = OTHER; note = Nucleotide with phosphorothioate linkage
  modified_base 6: mod_base = OTHER; note = Nucleotide with phosphorothioate linkage
  modified_base 7: mod_base = OTHER; note = Nucleotide with phosphorothioate linkage
  modified_base 8: mod_base = OTHER; note = Nucleotide with phosphorothioate linkage
  modified_base 9: mod_base = OTHER; note = Nucleotide with phosphorothioate linkage
  modified_base 10: mod_base = OTHER; note = Nucleotide with phosphorothioate linkage
  modified_base 11: mod_base = OTHER; note = Nucleotide with phosphorothioate linkage
  modified_base 12: mod_base = OTHER; note = Nucleotide with phosphorothioate linkage
  modified_base 13: mod_base = OTHER; note = Nucleotide with phosphorothioate linkage
  modified_base 14: mod_base = OTHER; note = Nucleotide with phosphorothioate linkage
  modified_base 15: mod_base = OTHER; note = beta-D-oxy locked nucleotide with phosphorothioate linkage
  modified_base 16: mod_base = OTHER; note = 5-methyl beta-D-oxy locked nucleotide with phosphorothioate linkage
  modified_base 17: mod_base = OTHER; note = beta-D-oxy locked nucleotide with phosphorothioate linkage
  modified_base 18: mod_base = OTHER; note = beta-D-oxy locked nucleotide with phosphorothioate linkage
acaatgaaatatattcat

SEQ ID NO: 490 - DNA, 20 bp, synthetic construct
  source 1..20: mol_type = other DNA
  modified_base 1: mod_base = OTHER; note = beta-D-oxy locked nucleotide with phosphorothioate linkage
  modified_base 2: mod_base = OTHER; note = beta-D-oxy locked nucleotide with phosphorothioate linkage
  modified_base 3: mod_base = OTHER; note = beta-D-oxy locked nucleotide with phosphorothioate linkage
  modified_base 4: mod_base = OTHER; note = Nucleotide with phosphorothioate linkage
  modified_base 5: mod_base = OTHER; note = Nucleotide with phosphorothioate linkage
  modified_base 6: mod_base = OTHER; note = Nucleotide with phosphorothioate linkage
  modified_base 7: mod_base = OTHER; note = Nucleotide with phosphorothioate linkage
  modified_base 8: mod_base = OTHER; note = Nucleotide with phosphorothioate linkage
  modified_base 9: mod_base = OTHER; note = Nucleotide with phosphorothioate linkage
  modified_base 10: mod_base = OTHER; note = Nucleotide with phosphorothioate linkage
  modified_base 11: mod_base = OTHER; note = Nucleotide with phosphorothioate linkage
  modified_base 12: mod_base = OTHER; note = Nucleotide with phosphorothioate linkage
  modified_base 13: mod_base = OTHER; note = Nucleotide with phosphorothioate linkage
  modified_base 14: mod_base = OTHER; note = Nucleotide with phosphorothioate linkage
  modified_base 15: mod_base = OTHER; note = Nucleotide with phosphorothioate linkage
  modified_base 16: mod_base = OTHER; note = Nucleotide with phosphorothioate linkage
  modified_base 17: mod_base = OTHER; note = beta-D-oxy locked nucleotide with phosphorothioate linkage
  modified_base 18: mod_base = OTHER; note = 5-methyl beta-D-oxy locked nucleotide with phosphorothioate linkage
  modified_base 19: mod_base = OTHER; note = beta-D-oxy locked nucleotide with phosphorothioate linkage
  modified_base 20: mod_base = OTHER; note = beta-D-oxy locked nucleotide with phosphorothioate linkage
gatattacaattcataacta

SEQ ID NO: 491 - DNA, 21 bp, synthetic construct
  source 1..21: mol_type = other DNA
  modified_base 1: mod_base = OTHER; note = 5-methyl beta-D-oxy locked nucleotide with phosphorothioate linkage
  modified_base 2: mod_base = OTHER; note = beta-D-oxy locked nucleotide with phosphorothioate linkage
  modified_base 3: mod_base = OTHER; note = beta-D-oxy locked nucleotide with phosphorothioate linkage
  modified_base 4: mod_base = OTHER; note = Nucleotide with phosphorothioate linkage
  modified_base 5: mod_base = OTHER; note = Nucleotide with phosphorothioate linkage
  modified_base 6: mod_base = OTHER; note = Nucleotide with phosphorothioate linkage
  modified_base 7: mod_base = OTHER; note = Nucleotide with phosphorothioate linkage
  modified_base 8: mod_base = OTHER; note = Nucleotide with phosphorothioate linkage
  modified_base 9: mod_base = OTHER; note = Nucleotide with phosphorothioate linkage
  modified_base 10: mod_base = OTHER; note = Nucleotide with phosphorothioate linkage
  modified_base 11: mod_base = OTHER; note = Nucleotide with phosphorothioate linkage
  modified_base 12: mod_base = OTHER; note = Nucleotide with phosphorothioate linkage
  modified_base 13: mod_base = OTHER; note = Nucleotide with phosphorothioate linkage
  modified_base 14: mod_base = OTHER; note = Nucleotide with phosphorothioate linkage
  modified_base 15: mod_base = OTHER; note = Nucleotide with phosphorothioate linkage
  modified_base 16: mod_base = OTHER; note = Nucleotide with phosphorothioate linkage
  modified_base 17: mod_base = OTHER; note = Nucleotide with phosphorothioate linkage
  modified_base 18: mod_base = OTHER; note = Nucleotide with phosphorothioate linkage
  modified_base 19: mod_base = OTHER; note = Nucleotide with phosphorothioate linkage
  modified_base 20: mod_base = OTHER; note = 5-methyl beta-D-oxy locked nucleotide with phosphorothioate linkage
  modified_base 21: mod_base = OTHER; note = beta-D-oxy locked nucleotide with phosphorothioate linkage
cagatattacaattcataact

SEQ ID NO: 492 - DNA, 19 bp, synthetic construct
  source 1..19: mol_type = other DNA
  modified_base 1: mod_base = OTHER; note = beta-D-oxy locked nucleotide with phosphorothioate linkage
  modified_base 2: mod_base = OTHER; note = beta-D-oxy locked nucleotide with phosphorothioate linkage
  modified_base 3: mod_base = OTHER; note = beta-D-oxy locked nucleotide with phosphorothioate linkage
  modified_base 4: mod_base = OTHER; note = Nucleotide with phosphorothioate linkage
  modified_base 5: mod_base = OTHER; note = Nucleotide with phosphorothioate linkage
  modified_base 6: mod_base = OTHER; note = Nucleotide with phosphorothioate linkage
  modified_base 7: mod_base = OTHER; note = Nucleotide with phosphorothioate linkage
  modified_base 8: mod_base = OTHER; note = Nucleotide with phosphorothioate linkage
  modified_base 9: mod_base = OTHER; note = Nucleotide with phosphorothioate linkage
  modified_base 10: mod_base = OTHER; note = Nucleotide with phosphorothioate linkage
  modified_base 11: mod_base = OTHER; note = Nucleotide with phosphorothioate linkage
  modified_base 12: mod_base = OTHER; note = Nucleotide with phosphorothioate linkage
  modified_base 13: mod_base = OTHER; note = Nucleotide with phosphorothioate linkage
  modified_base 14: mod_base = OTHER; note = Nucleotide with phosphorothioate linkage
  modified_base 15: mod_base = OTHER; note = Nucleotide with phosphorothioate linkage
  modified_base 16: mod_base = OTHER; note = Nucleotide with phosphorothioate linkage
  modified_base 17: mod_base = OTHER; note = beta-D-oxy locked nucleotide with phosphorothioate linkage
  modified_base 18: mod_base = OTHER; note = 5-methyl beta-D-oxy locked nucleotide with phosphorothioate linkage
  modified_base 19: mod_base = OTHER; note = beta-D-oxy locked nucleotide with phosphorothioate linkage
gatattacaattcataact

SEQ ID NO: 493 - DNA, 20 bp, synthetic construct
  source 1..20: mol_type = other DNA
  modified_base 1: mod_base = OTHER; note = beta-D-oxy locked nucleotide with phosphorothioate linkage
  modified_base 2: mod_base = OTHER; note = beta-D-oxy locked nucleotide with phosphorothioate linkage
  modified_base 3: mod_base = OTHER; note = beta-D-oxy locked nucleotide with phosphorothioate linkage
  modified_base 4: mod_base = OTHER; note = beta-D-oxy locked nucleotide with phosphorothioate linkage
  modified_base 5: mod_base = OTHER; note = Nucleotide with phosphorothioate linkage
  modified_base 6: mod_base = OTHER; note = Nucleotide with phosphorothioate linkage
  modified_base 7: mod_base = OTHER; note = Nucleotide with phosphorothioate linkage
  modified_base 8: mod_base = OTHER; note = Nucleotide with phosphorothioate linkage
  modified_base 9: mod_base = OTHER; note = Nucleotide with phosphorothioate linkage
  modified_base 10: mod_base = OTHER; note = Nucleotide with phosphorothioate linkage
  modified_base 11: mod_base = OTHER; note = Nucleotide with phosphorothioate linkage
  modified_base 12: mod_base = OTHER; note = Nucleotide with phosphorothioate linkage
  modified_base 13: mod_base = OTHER; note = Nucleotide with phosphorothioate linkage
  modified_base 14: mod_base = OTHER; note = Nucleotide with phosphorothioate linkage
  modified_base 15: mod_base = OTHER; note = Nucleotide with phosphorothioate linkage
  modified_base 16: mod_base = OTHER; note = Nucleotide with phosphorothioate linkage
  modified_base 17: mod_base = OTHER; note = beta-D-oxy locked nucleotide with phosphorothioate linkage
  modified_base 18: mod_base = OTHER; note = beta-D-oxy locked nucleotide with phosphorothioate linkage
  modified_base 19: mod_base = OTHER; note = 5-methyl beta-D-oxy locked nucleotide with phosphorothioate linkage
  modified_base 20: mod_base = OTHER; note = beta-D-oxy locked nucleotide with phosphorothioate linkage
agatattacaattcataact

SEQ ID NO: 494 - DNA, 18 bp, synthetic construct
  source 1..18: mol_type = other DNA
  modified_base 1: mod_base = OTHER; note = beta-D-oxy locked nucleotide with phosphorothioate linkage
  modified_base 2: mod_base = OTHER; note = beta-D-oxy locked nucleotide with phosphorothioate linkage
  modified_base 3: mod_base = OTHER; note = 5-methyl beta-D-oxy locked nucleotide with phosphorothioate linkage
  modified_base 4: mod_base = OTHER; note = Nucleotide with phosphorothioate linkage
  modified_base 5: mod_base = OTHER; note = Nucleotide with phosphorothioate linkage
  modified_base 6: mod_base = OTHER; note = Nucleotide with phosphorothioate linkage
  modified_base 7: mod_base = OTHER; note = Nucleotide with phosphorothioate linkage
  modified_base 8: mod_base = OTHER; note = Nucleotide with phosphorothioate linkage
  modified_base 9: mod_base = OTHER; note = Nucleotide with phosphorothioate linkage
  modified_base 10: mod_base = OTHER; note = Nucleotide with phosphorothioate linkage
  modified_base 11: mod_base = OTHER; note = Nucleotide with phosphorothioate linkage
  modified_base 12: mod_base = OTHER; note = Nucleotide with phosphorothioate linkage
  modified_base 13: mod_base = OTHER; note = Nucleotide with phosphorothioate linkage
  modified_base 14: mod_base = OTHER; note = Nucleotide with phosphorothioate linkage
  modified_base 15: mod_base = OTHER; note = beta-D-oxy locked nucleotide with phosphorothioate linkage
  modified_base 16: mod_base = OTHER; note = beta-D-oxy locked nucleotide with phosphorothioate linkage
  modified_base 17: mod_base = OTHER; note = 5-methyl beta-D-oxy locked nucleotide with phosphorothioate linkage
  modified_base 18: mod_base = OTHER; note = beta-D-oxy locked nucleotide with phosphorothioate linkage
gtcagatattacaattca

SEQ ID NO: 495 - DNA, 17 bp, synthetic construct
  source 1..17: mol_type = other DNA
  modified_base 1: mod_base = OTHER; note = beta-D-oxy locked nucleotide with phosphorothioate linkage
  modified_base 2: mod_base = OTHER; note = beta-D-oxy locked nucleotide with phosphorothioate linkage
  modified_base 3: mod_base = OTHER; note = beta-D-oxy locked nucleotide with phosphorothioate linkage
  modified_base 4: mod_base = OTHER; note = 5-methyl beta-D-oxy locked nucleotide with phosphorothioate linkage
  modified_base 5: mod_base = OTHER; note = Nucleotide with phosphorothioate linkage
  modified_base 6: mod_base = OTHER; note = Nucleotide with phosphorothioate linkage
  modified_base 7: mod_base = OTHER; note = Nucleotide with phosphorothioate linkage
  modified_base 8: mod_base = OTHER; note = Nucleotide with phosphorothioate linkage
  modified_base 9: mod_base = OTHER; note = Nucleotide with phosphorothioate linkage
  modified_base 10: mod_base = OTHER; note = Nucleotide with phosphorothioate linkage
  modified_base 11: mod_base = OTHER; note = Nucleotide with phosphorothioate linkage
  modified_base 12: mod_base = OTHER; note = Nucleotide with phosphorothioate linkage
  modified_base 13: mod_base = OTHER; note = Nucleotide with phosphorothioate linkage
  modified_base 14: mod_base = OTHER; note = Nucleotide with phosphorothioate linkage
  modified_base 15: mod_base = OTHER; note = 5-methyl beta-D-oxy locked nucleotide with phosphorothioate linkage
  modified_base 16: mod_base = OTHER; note = beta-D-oxy locked nucleotide with phosphorothioate linkage
  modified_base 17: mod_base = OTHER; note = beta-D-oxy locked nucleotide with phosphorothioate linkage
aatctccagaacaacta

SEQ ID NO: 496 - DNA, 17 bp, synthetic construct
  source 1..17: mol_type = other DNA
  modified_base 1: mod_base = OTHER; note = 5-methyl beta-D-oxy locked nucleotide with phosphorothioate linkage
  modified_base 2: mod_base = OTHER; note = beta-D-oxy locked nucleotide with phosphorothioate linkage
  modified_base 3: mod_base = OTHER; note = Nucleotide with phosphorothioate linkage
  modified_base 4: mod_base = OTHER; note = Nucleotide with phosphorothioate linkage
  modified_base 5: mod_base = OTHER; note = Nucleotide with phosphorothioate linkage
  modified_base 6: mod_base = OTHER; note = Nucleotide with phosphorothioate linkage
  modified_base 7: mod_base = OTHER; note = Nucleotide with phosphorothioate linkage
  modified_base 8: mod_base = OTHER; note = Nucleotide with phosphorothioate linkage
  modified_base 9: mod_base = OTHER; note = Nucleotide with phosphorothioate linkage
  modified_base 10: mod_base = OTHER; note = Nucleotide with phosphorothioate linkage
  modified_base 11: mod_base = OTHER; note = Nucleotide with phosphorothioate linkage
  modified_base 12: mod_base = OTHER; note = Nucleotide with phosphorothioate linkage
  modified_base 13: mod_base = OTHER; note = Nucleotide with phosphorothioate linkage
  modified_base 14: mod_base = OTHER; note = beta-D-oxy locked nucleotide with phosphorothioate linkage
  modified_base 15: mod_base = OTHER; note = beta-D-oxy locked nucleotide with phosphorothioate linkage
  modified_base 16: mod_base = OTHER; note = 5-methyl beta-D-oxy locked nucleotide with phosphorothioate linkage
  modified_base 17: mod_base = OTHER; note = beta-D-oxy locked nucleotide with phosphorothioate linkage
caatctccagaacaact

SEQ ID NO: 497 - DNA, 17 bp, synthetic construct
  source 1..17: mol_type = other DNA
  modified_base 1: mod_base = OTHER; note = beta-D-oxy locked nucleotide with phosphorothioate linkage
  modified_base 2: mod_base = OTHER; note = 5-methyl beta-D-oxy locked nucleotide with phosphorothioate linkage
  modified_base 3: mod_base = OTHER; note = beta-D-oxy locked nucleotide with phosphorothioate linkage
  modified_base 4: mod_base = OTHER; note = beta-D-oxy locked nucleotide with phosphorothioate linkage
  modified_base 5: mod_base = OTHER; note = Nucleotide with phosphorothioate linkage
  modified_base 6: mod_base = OTHER; note = Nucleotide with phosphorothioate linkage
  modified_base 7: mod_base = OTHER; note = Nucleotide with phosphorothioate linkage
  modified_base 8: mod_base = OTHER; note = Nucleotide with phosphorothioate linkage
  modified_base 9: mod_base = OTHER; note = Nucleotide with phosphorothioate linkage
  modified_base 10: mod_base = OTHER; note = Nucleotide with phosphorothioate linkage
  modified_base 11: mod_base = OTHER; note = Nucleotide with phosphorothioate linkage
  modified_base 12: mod_base = OTHER; note = Nucleotide with phosphorothioate linkage
  modified_base 13: mod_base = OTHER; note = Nucleotide with phosphorothioate linkage
  modified_base 14: mod_base = OTHER; note = 5-methyl beta-D-oxy locked nucleotide with phosphorothioate linkage
  modified_base 15: mod_base = OTHER; note = beta-D-oxy locked nucleotide with phosphorothioate linkage
  modified_base 16: mod_base = OTHER; note = beta-D-oxy locked nucleotide with phosphorothioate linkage
  modified_base 17: mod_base = OTHER; note = 5-methyl beta-D-oxy locked nucleotide with phosphorothioate linkage
tcaatctccagaacaac

SEQ ID NO: 498 - DNA, 17 bp, synthetic construct
  source 1..17: mol_type = other DNA
  modified_base 1: mod_base = OTHER; note = beta-D-oxy locked nucleotide with phosphorothioate linkage
  modified_base 2: mod_base = OTHER; note = beta-D-oxy locked nucleotide with phosphorothioate linkage
  modified_base 3: mod_base = OTHER; note = Nucleotide with phosphorothioate linkage
  modified_base 4: mod_base = OTHER; note = Nucleotide with phosphorothioate linkage
  modified_base 5: mod_base = OTHER; note = Nucleotide with phosphorothioate linkage
  modified_base 6: mod_base = OTHER; note = Nucleotide with phosphorothioate linkage
  modified_base 7: mod_base = OTHER; note = Nucleotide with phosphorothioate linkage
  modified_base 8: mod_base = OTHER; note = Nucleotide with phosphorothioate linkage
  modified_base 9: mod_base = OTHER; note = Nucleotide with phosphorothioate linkage
  modified_base 10: mod_base = OTHER; note = Nucleotide with phosphorothioate linkage
  modified_base 11: mod_base = OTHER; note = Nucleotide with phosphorothioate linkage
  modified_base 12: mod_base = OTHER; note = Nucleotide with phosphorothioate linkage
  modified_base 13: mod_base = OTHER; note = Nucleotide with phosphorothioate linkage
  modified_base 14: mod_base = OTHER; note = Nucleotide with phosphorothioate linkage
  modified_base 15: mod_base = OTHER; note = Nucleotide with phosphorothioate linkage
  modified_base 16: mod_base = OTHER; note = 5-methyl beta-D-oxy locked nucleotide with phosphorothioate linkage
  modified_base 17: mod_base = OTHER; note = beta-D-oxy locked nucleotide with phosphorothioate linkage
tacagtgtcaatctcca

SEQ ID NO: 499 - DNA, 16 bp, synthetic construct
  source 1..16: mol_type = other DNA
  modified_base 1: mod_base = OTHER; note = 5-methyl beta-D-oxy locked nucleotide with phosphorothioate linkage
  modified_base 2: mod_base = OTHER; note = beta-D-oxy locked nucleotide with phosphorothioate linkage
  modified_base 3: mod_base = OTHER; note = beta-D-oxy locked nucleotide with phosphorothioate linkage
  modified_base 4: mod_base = OTHER; note = Nucleotide with phosphorothioate linkage
  modified_base 5: mod_base = OTHER; note = Nucleotide with phosphorothioate linkage
  modified_base 6: mod_base = OTHER; note = Nucleotide with phosphorothioate linkage
  modified_base 7: mod_base = OTHER; note = Nucleotide with phosphorothioate linkage
  modified_base 8: mod_base = OTHER; note = Nucleotide with phosphorothioate linkage
  modified_base 9: mod_base = OTHER; note = Nucleotide with phosphorothioate linkage
  modified_base 10: mod_base = OTHER; note = Nucleotide with phosphorothioate linkage
  modified_base 11: mod_base = OTHER; note = Nucleotide with phosphorothioate linkage
  modified_base 12: mod_base = OTHER; note = Nucleotide with phosphorothioate linkage
  modified_base 13: mod_base = OTHER; note = Nucleotide with phosphorothioate linkage
  modified_base 14: mod_base = OTHER; note = 5-methyl beta-D-oxy locked nucleotide with phosphorothioate linkage
  modified_base 15: mod_base = OTHER; note = beta-D-oxy locked nucleotide with phosphorothioate linkage
  modified_base 16: mod_base = OTHER; note = 5-methyl beta-D-oxy locked nucleotide with phosphorothioate linkage
ctacagtgtcaatctc

SEQ ID NO: 500 - DNA, 16 bp, synthetic construct
  source 1..16: mol_type = other DNA
  modified_base 1: mod_base = OTHER; note = beta-D-oxy locked nucleotide with phosphorothioate linkage
  modified_base 2: mod_base = OTHER; note = beta-D-oxy locked nucleotide with phosphorothioate linkage
  modified_base 3: mod_base = OTHER; note = Nucleotide with phosphorothioate linkage
  modified_base 4: mod_base = OTHER; note = Nucleotide with phosphorothioate linkage
  modified_base 5: mod_base = OTHER; note = Nucleotide with phosphorothioate linkage
  modified_base 6: mod_base = OTHER; note = Nucleotide with phosphorothioate linkage
  modified_base 7: mod_base = OTHER; note = Nucleotide with phosphorothioate linkage
  modified_base 8: mod_base = OTHER; note = Nucleotide with phosphorothioate linkage
  modified_base 9: mod_base = OTHER; note = Nucleotide with phosphorothioate linkage
  modified_base 10: mod_base = OTHER; note = Nucleotide with phosphorothioate linkage
  modified_base 11: mod_base = OTHER; note = Nucleotide with phosphorothioate linkage
  modified_base 12: mod_base = OTHER; note = Nucleotide with phosphorothioate linkage
  modified_base 13: mod_base = OTHER; note = Nucleotide with phosphorothioate linkage
  modified_base 14: mod_base = OTHER; note = Nucleotide with phosphorothioate linkage
  modified_base 15: mod_base = OTHER; note = beta-D-oxy locked nucleotide with phosphorothioate linkage
  modified_base 16: mod_base = OTHER; note = 5-methyl beta-D-oxy locked nucleotide with phosphorothioate linkage
tagtagccccacacac

SEQ ID NO: 501 - DNA, 16 bp, synthetic construct
  source 1..16: mol_type = other DNA
  modified_base 1: mod_base = OTHER; note = 5-methyl beta-D-oxy locked nucleotide with phosphorothioate linkage
  modified_base 2: mod_base = OTHER; note = 5-methyl beta-D-oxy locked nucleotide with phosphorothioate linkage
  modified_base 3: mod_base = OTHER; note = Nucleotide with phosphorothioate linkage
  modified_base 4: mod_base = OTHER; note = Nucleotide with phosphorothioate linkage
  modified_base 5: mod_base = OTHER; note = Nucleotide with phosphorothioate linkage
  modified_base 6: mod_base = OTHER; note = Nucleotide with phosphorothioate linkage
  modified_base 7: mod_base = OTHER; note = Nucleotide with phosphorothioate linkage
  modified_base 8: mod_base = OTHER; note = Nucleotide with phosphorothioate linkage
  modified_base 9: mod_base = OTHER; note = Nucleotide with phosphorothioate linkage
  modified_base 10: mod_base = OTHER; note = Nucleotide with phosphorothioate linkage
  modified_base 11: mod_base = OTHER; note = Nucleotide with phosphorothioate linkage
  modified_base 12: mod_base = OTHER; note = Nucleotide with phosphorothioate linkage
  modified_base 13: mod_base = OTHER; note = Nucleotide with phosphorothioate linkage
  modified_base 14: mod_base = OTHER; note = Nucleotide with phosphorothioate linkage
  modified_base 15: mod_base = OTHER; note = beta-D-oxy locked nucleotide with phosphorothioate linkage
  modified_base 16: mod_base = OTHER; note = 5-methyl beta-D-oxy locked nucleotide with phosphorothioate linkage
cccctgtacactttac

SEQ ID NO: 502 - DNA, 16 bp, synthetic construct
  source 1..16: mol_type = other DNA
  modified_base 1: mod_base = OTHER; note = 5-methyl beta-D-oxy locked nucleotide with phosphorothioate linkage
  modified_base 2: mod_base = OTHER; note = beta-D-oxy locked nucleotide with phosphorothioate linkage
  modified_base 3: mod_base = OTHER; note = Nucleotide with phosphorothioate linkage
  modified_base 4: mod_base = OTHER; note = Nucleotide with phosphorothioate linkage
  modified_base 5: mod_base = OTHER; note = Nucleotide with phosphorothioate linkage
  modified_base 6: mod_base = OTHER; note = Nucleotide with phosphorothioate linkage
  modified_base 7: mod_base = OTHER; note = Nucleotide with phosphorothioate linkage
  modified_base 8: mod_base = OTHER; note = Nucleotide with phosphorothioate linkage
  modified_base 9: mod_base = OTHER; note = Nucleotide with phosphorothioate linkage
  modified_base 10: mod_base = OTHER; note = Nucleotide with phosphorothioate linkage
  modified_base 11: mod_base = OTHER; note = Nucleotide with phosphorothioate linkage
  modified_base 12: mod_base = OTHER; note = Nucleotide with phosphorothioate linkage
  modified_base 13: mod_base = OTHER; note = 5-methyl beta-D-oxy locked nucleotide with phosphorothioate linkage
  modified_base 14: mod_base = OTHER; note = beta-D-oxy locked nucleotide with phosphorothioate linkage
  modified_base 15: mod_base = OTHER; note = beta-D-oxy locked nucleotide with phosphorothioate linkage
  modified_base 16: mod_base = OTHER; note = beta-D-oxy locked nucleotide with phosphorothioate linkage
ctaccaagacatctat

SEQ ID NO: 503 - DNA, 16 bp, synthetic construct
  source 1..16: mol_type = other DNA
  modified_base 1: mod_base = OTHER; note = beta-D-oxy locked nucleotide with phosphorothioate linkage
  modified_base 2: mod_base = OTHER; note = 5-methyl beta-D-oxy locked nucleotide with phosphorothioate linkage
  modified_base 3: mod_base = OTHER; note = Nucleotide with phosphorothioate linkage
  modified_base 4: mod_base = OTHER; note = Nucleotide with phosphorothioate linkage
  modified_base 5: mod_base = OTHER; note = Nucleotide with phosphorothioate linkage
  modified_base 6: mod_base = OTHER; note = Nucleotide with phosphorothioate linkage
  modified_base 7: mod_base = OTHER; note = Nucleotide with phosphorothioate linkage
  modified_base 8: mod_base = OTHER; note = Nucleotide with phosphorothioate linkage
  modified_base 9: mod_base = OTHER; note = Nucleotide with phosphorothioate linkage
  modified_base 10: mod_base = OTHER; note = Nucleotide with phosphorothioate linkage
  modified_base 11: mod_base = OTHER; note = Nucleotide with phosphorothioate linkage
  modified_base 12: mod_base = OTHER; note = Nucleotide with phosphorothioate linkage
  modified_base 13: mod_base = OTHER; note = Nucleotide with phosphorothioate linkage
  modified_base 14: mod_base = OTHER; note = Nucleotide with phosphorothioate linkage
  modified_base 15: mod_base = OTHER; note = beta-D-oxy locked nucleotide with phosphorothioate linkage
  modified_base 16: mod_base = OTHER; note = beta-D-oxy locked nucleotide with phosphorothioate linkage
gctaccaagacatcta

SEQ ID NO: 504 - DNA, 17 bp, synthetic construct
  source 1..17: mol_type = other DNA
  modified_base 1: mod_base = OTHER; note = beta-D-oxy locked nucleotide with phosphorothioate linkage
  modified_base 2: mod_base = OTHER; note = beta-D-oxy locked nucleotide with phosphorothioate linkage
  modified_base 3: mod_base = OTHER; note = beta-D-oxy locked nucleotide with phosphorothioate linkage
  modified_base 4: mod_base = OTHER; note = 5-methyl beta-D-oxy locked nucleotide with phosphorothioate linkage
  modified_base 5: mod_base = OTHER; note = Nucleotide with phosphorothioate linkage
  modified_base 6: mod_base = OTHER; note = Nucleotide with phosphorothioate linkage
  modified_base 7: mod_base = OTHER; note = Nucleotide with phosphorothioate linkage
  modified_base 8: mod_base = OTHER; note = Nucleotide with phosphorothioate linkage
  modified_base 9: mod_base = OTHER; note = Nucleotide with phosphorothioate linkage
  modified_base 10: mod_base = OTHER; note = Nucleotide with phosphorothioate linkage
  modified_base 11: mod_base = OTHER; note = Nucleotide with phosphorothioate linkage
  modified_base 12: mod_base = OTHER; note = Nucleotide with phosphorothioate linkage
  modified_base 13: mod_base = OTHER; note = Nucleotide with phosphorothioate linkage
  modified_base 14: mod_base = OTHER; note = Nucleotide with phosphorothioate linkage
  modified_base 15: mod_base = OTHER; note = Nucleotide with phosphorothioate linkage
  modified_base 16: mod_base = OTHER; note = beta-D-oxy locked nucleotide with phosphorothioate linkage
  modified_base 17: mod_base = OTHER; note = 5-methyl beta-D-oxy locked nucleotide with phosphorothioate linkage
tgaccttcacttctatc

SEQ ID NO: 505 - DNA, 19 bp, synthetic construct
  source 1..19: mol_type = other DNA
  modified_base 1: mod_base = OTHER; note = 5-methyl beta-D-oxy locked nucleotide with phosphorothioate linkage
  modified_base 2: mod_base = OTHER; note = beta-D-oxy locked nucleotide with phosphorothioate linkage
  modified_base 3: mod_base = OTHER; note = Nucleotide with phosphorothioate linkage
  modified_base 4: mod_base = OTHER; note = Nucleotide with phosphorothioate linkage
  modified_base 5: mod_base = OTHER; note = Nucleotide with phosphorothioate linkage
  modified_base 6: mod_base = OTHER; note = Nucleotide with phosphorothioate linkage
  modified_base 7: mod_base = OTHER; note = Nucleotide with phosphorothioate linkage
  modified_base 8: mod_base = OTHER; note = Nucleotide with phosphorothioate linkage
  modified_base 9: mod_base = OTHER; note = Nucleotide with phosphorothioate linkage
  modified_base 10: mod_base = OTHER; note = Nucleotide with phosphorothioate linkage
  modified_base 11: mod_base = OTHER; note = Nucleotide with phosphorothioate linkage
  modified_base 12: mod_base = OTHER; note = Nucleotide with phosphorothioate linkage
  modified_base 13: mod_base = OTHER; note = Nucleotide with phosphorothioate linkage
  modified_base 14: mod_base = OTHER; note = Nucleotide with phosphorothioate linkage
  modified_base 15: mod_base = OTHER; note = Nucleotide with phosphorothioate linkage
  modified_base 16: mod_base = OTHER; note = Nucleotide with phosphorothioate linkage
  modified_base 17: mod_base = OTHER; note = Nucleotide with phosphorothioate linkage
  modified_base 18: mod_base = OTHER; note = 5-methyl beta-D-oxy locked nucleotide with phosphorothioate linkage
  modified_base 19: mod_base = OTHER; note = beta-D-oxy locked nucleotide with phosphorothioate linkage
cactcaccagatacacaca

SEQ ID NO: 506 - DNA, 18 bp, synthetic construct
  source 1..18: mol_type = other DNA
  modified_base 1: mod_base = OTHER; note = beta-D-oxy locked nucleotide with phosphorothioate linkage
  modified_base 2: mod_base = OTHER; note = 5-methyl beta-D-oxy locked nucleotide with phosphorothioate linkage
  modified_base 3: mod_base = OTHER; note = Nucleotide with phosphorothioate linkage
  modified_base 4: mod_base = OTHER; note = Nucleotide with phosphorothioate linkage
  modified_base 5: mod_base = OTHER; note = Nucleotide with phosphorothioate linkage
  modified_base 6: mod_base = OTHER; note = Nucleotide with phosphorothioate linkage
  modified_base 7: mod_base = OTHER; note = Nucleotide with phosphorothioate linkage
  modified_base 8: mod_base = OTHER; note = Nucleotide with phosphorothioate linkage
  modified_base 9: mod_base = OTHER; note = Nucleotide with phosphorothioate linkage
  modified_base 10: mod_base = OTHER; note = Nucleotide with phosphorothioate linkage
  modified_base 11: mod_base = OTHER; note = Nucleotide with phosphorothioate linkage
  modified_base 12: mod_base = OTHER; note = Nucleotide with phosphorothioate linkage
  modified_base 13: mod_base = OTHER; note = Nucleotide with phosphorothioate linkage
  modified_base 14: mod_base = OTHER; note = Nucleotide with phosphorothioate linkage
  modified_base 15: mod_base = OTHER; note = Nucleotide with phosphorothioate linkage
  modified_base 16: mod_base = OTHER; note = Nucleotide with phosphorothioate linkage
  modified_base 17: mod_base = OTHER; note = 5-methyl beta-D-oxy locked nucleotide with phosphorothioate linkage
  modified_base 18: mod_base = OTHER; note = beta-D-oxy locked nucleotide with phosphorothioate linkage
actcaccagatacacaca

SEQ ID NO: 507 - DNA, 16 bp, synthetic construct
  source 1..16: mol_type = other DNA
  modified_base 1: mod_base = OTHER; note = beta-D-oxy locked nucleotide with phosphorothioate linkage
  modified_base 2: mod_base = OTHER; note = 5-methyl beta-D-oxy locked nucleotide with phosphorothioate linkage
  modified_base 3: mod_base = OTHER; note = Nucleotide with phosphorothioate linkage
  modified_base 4: mod_base = OTHER; note = Nucleotide with phosphorothioate linkage
  modified_base 5: mod_base = OTHER; note = Nucleotide with phosphorothioate linkage
  modified_base 6: mod_base = OTHER; note = Nucleotide with phosphorothioate linkage
  modified_base 7: mod_base = OTHER; note = Nucleotide with phosphorothioate linkage
  modified_base 8: mod_base = OTHER; note = Nucleotide with phosphorothioate linkage
  modified_base 9: mod_base = OTHER; note = Nucleotide with phosphorothioate linkage
  modified_base 10: mod_base = OTHER; note = Nucleotide with phosphorothioate linkage
  modified_base 11: mod_base = OTHER; note = Nucleotide with phosphorothioate linkage
  modified_base 12: mod_base = OTHER; note = Nucleotide with phosphorothioate linkage
  modified_base 13: mod_base = OTHER; note = Nucleotide with phosphorothioate linkage
  modified_base 14: mod_base = OTHER; note = 5-methyl beta-D-oxy locked nucleotide with phosphorothioate linkage
  modified_base 15: mod_base = OTHER; note = beta-D-oxy locked nucleotide with phosphorothioate linkage
  modified_base 16: mod_base = OTHER; note = beta-D-oxy locked nucleotide with phosphorothioate linkage
tctctttactcaccga

SEQ ID NO: 508 - DNA, 20 bp, synthetic construct
  source 1..20: mol_type = other DNA
  modified_base 1: mod_base = OTHER; note = beta-D-oxy locked nucleotide with phosphorothioate linkage
  modified_base 2: mod_base = OTHER; note = beta-D-oxy locked nucleotide with phosphorothioate linkage
  modified_base 3: mod_base = OTHER; note = Nucleotide with phosphorothioate linkage
  modified_base 4: mod_base = OTHER; note = Nucleotide with phosphorothioate linkage
  modified_base 5: mod_base = OTHER; note = Nucleotide with phosphorothioate linkage
  modified_base 6: mod_base = OTHER; note = Nucleotide with phosphorothioate linkage
  modified_base 7: mod_base = OTHER; note = Nucleotide with phosphorothioate linkage
  modified_base 8: mod_base = OTHER; note = Nucleotide with phosphorothioate linkage
  modified_base 9: mod_base = OTHER; note = Nucleotide with phosphorothioate linkage
  modified_base 10: mod_base = OTHER; note = Nucleotide with phosphorothioate linkage
  modified_base 11: mod_base = OTHER; note = Nucleotide with phosphorothioate linkage
  modified_base 12: mod_base = OTHER; note = Nucleotide with phosphorothioate linkage
  modified_base 13: mod_base = OTHER; note = Nucleotide with phosphorothioate linkage
  modified_base 14: mod_base = OTHER; note = Nucleotide with phosphorothioate linkage
  modified_base 15: mod_base = OTHER; note = Nucleotide with phosphorothioate linkage
  modified_base 16: mod_base = OTHER; note = Nucleotide with phosphorothioate linkage
  modified_base 17: mod_base = OTHER; note = Nucleotide with phosphorothioate linkage
  modified_base 18: mod_base = OTHER; note = Nucleotide with phosphorothioate linkage
  modified_base 19: mod_base = OTHER; note = 5-methyl beta-D-oxy locked nucleotide with phosphorothioate linkage
  modified_base 20: mod_base = OTHER; note = 5-methyl beta-D-oxy locked nucleotide with phosphorothioate linkage
gaaacttctctttactcacc

SEQ ID NO: 509 - DNA, 17 bp, synthetic construct
  source 1..17: mol_type = other DNA
  modified_base 1: mod_base = OTHER; note = beta-D-oxy locked nucleotide with phosphorothioate linkage
  modified_base 2: mod_base = OTHER; note = 5-methyl beta-D-oxy locked nucleotide with phosphorothioate linkage
  modified_base 3: mod_base = OTHER; note = beta-D-oxy locked nucleotide with phosphorothioate linkage
  modified_base 4: mod_base = OTHER; note = Nucleotide with phosphorothioate linkage
  modified_base 5: mod_base = OTHER; note = Nucleotide with phosphorothioate linkage
  modified_base 6: mod_base = OTHER; note = Nucleotide with phosphorothioate linkage
  modified_base 7: mod_base = OTHER; note = Nucleotide with phosphorothioate linkage
  modified_base 8: mod_base = OTHER; note = Nucleotide with phosphorothioate linkage
  modified_base 9: mod_base = OTHER; note = Nucleotide with phosphorothioate linkage
  modified_base 10: mod_base = OTHER; note = Nucleotide with phosphorothioate linkage
  modified_base 11: mod_base = OTHER; note = Nucleotide with phosphorothioate linkage
  modified_base 12: mod_base = OTHER; note = Nucleotide with phosphorothioate linkage
  modified_base 13: mod_base = OTHER; note = Nucleotide with phosphorothioate linkage
  modified_base 14: mod_base = OTHER; note = Nucleotide with phosphorothioate linkage
  modified_base 15: mod_base = OTHER; note = Nucleotide with phosphorothioate linkage
  modified_base 16: mod_base = OTHER; note = 5-methyl beta-D-oxy locked nucleotide with phosphorothioate linkage
  modified_base 17: mod_base = OTHER; note = 5-methyl beta-D-oxy locked nucleotide with phosphorothioate linkage
acttctctttactcacc

SEQ ID NO: 510 - DNA, 19 bp, synthetic construct
  source 1..19: mol_type = other DNA
  modified_base 1: mod_base = OTHER; note = beta-D-oxy locked nucleotide with phosphorothioate linkage
  modified_base 2: mod_base = OTHER; note = beta-D-oxy locked nucleotide with phosphorothioate linkage
  modified_base 3: mod_base = OTHER; note = Nucleotide with phosphorothioate linkage
  modified_base 4: mod_base = OTHER; note = Nucleotide with phosphorothioate linkage
  modified_base 5: mod_base = OTHER; note = Nucleotide with phosphorothioate linkage
  modified_base 6: mod_base = OTHER; note = Nucleotide with phosphorothioate linkage
  modified_base 7: mod_base = OTHER; note = Nucleotide with phosphorothioate linkage
  modified_base 8: mod_base = OTHER; note = Nucleotide with phosphorothioate linkage
  modified_base 9: mod_base = OTHER; note = Nucleotide with phosphorothioate linkage
  modified_base 10: mod_base = OTHER; note = Nucleotide with phosphorothioate linkage
  modified_base 11: mod_base = OTHER; note = Nucleotide with phosphorothioate linkage
  modified_base 12: mod_base = OTHER; note = Nucleotide with phosphorothioate linkage
  modified_base 13: mod_base = OTHER; note = Nucleotide with phosphorothioate linkage
  modified_base 14: mod_base = OTHER; note = Nucleotide with phosphorothioate linkage
  modified_base 15: mod_base = OTHER; note = Nucleotide with phosphorothioate linkage
  modified_base 16: mod_base = OTHER; note = Nucleotide with phosphorothioate linkage
  modified_base 17: mod_base = OTHER; note = Nucleotide with phosphorothioate linkage
  modified_base 18: mod_base = OTHER; note = 5-methyl beta-D-oxy locked nucleotide with phosphorothioate linkage
  modified_base 19: mod_base = OTHER; note = 5-methyl beta-D-oxy locked nucleotide with phosphorothioate linkage
aaacttctctttactcacc

SEQ ID NO: 511 - DNA, 18 bp, synthetic construct
  source 1..18: mol_type = other DNA
  modified_base 1: mod_base = OTHER; note = beta-D-oxy locked nucleotide with phosphorothioate linkage
  modified_base 2: mod_base = OTHER; note = beta-D-oxy locked nucleotide with phosphorothioate linkage
  modified_base 3: mod_base = OTHER; note = Nucleotide with phosphorothioate linkage
  modified_base 4: mod_base = OTHER; note = Nucleotide with phosphorothioate linkage
  modified_base 5: mod_base = OTHER; note = Nucleotide with phosphorothioate linkage
  modified_base 6: mod_base = OTHER; note = Nucleotide with phosphorothioate linkage
  modified_base 7: mod_base = OTHER; note = Nucleotide with phosphorothioate linkage
  modified_base 8: mod_base = OTHER; note = Nucleotide with phosphorothioate linkage
  modified_base 9: mod_base = OTHER; note = Nucleotide with phosphorothioate linkage
  modified_base 10: mod_base = OTHER; note = Nucleotide with phosphorothioate linkage
  modified_base 11: mod_base = OTHER; note = Nucleotide with phosphorothioate linkage
  modified_base 12: mod_base = OTHER; note = Nucleotide with phosphorothioate linkage
  modified_base 13: mod_base = OTHER; note = Nucleotide with phosphorothioate linkage
  modified_base 14: mod_base = OTHER; note = Nucleotide with phosphorothioate linkage
  modified_base 15: mod_base = OTHER; note = Nucleotide with phosphorothioate linkage
  modified_base 16: mod_base = OTHER; note = Nucleotide with phosphorothioate linkage
  modified_base 17: mod_base = OTHER; note = 5-methyl beta-D-oxy locked nucleotide with phosphorothioate linkage
  modified_base 18: mod_base = OTHER; note = 5-methyl beta-D-oxy locked nucleotide with phosphorothioate linkage
aacttctctttactcacc

SEQ ID NO: 512 - DNA, 19 bp, synthetic construct
  source 1..19: mol_type = other DNA
  modified_base 1: mod_base = OTHER; note = beta-D-oxy locked nucleotide with phosphorothioate linkage
  modified_base 2: mod_base = OTHER; note = beta-D-oxy locked nucleotide with phosphorothioate linkage
  modified_base 3: mod_base = OTHER; note = beta-D-oxy locked nucleotide with phosphorothioate linkage
  modified_base 4: mod_base = OTHER; note = Nucleotide with phosphorothioate linkage
  modified_base 5: mod_base = OTHER; note = Nucleotide with phosphorothioate linkage
  modified_base 6: mod_base = OTHER; note = Nucleotide with phosphorothioate linkage
  modified_base 7: mod_base = OTHER; note = Nucleotide with phosphorothioate linkage
  modified_base 8: mod_base = OTHER; note = Nucleotide with phosphorothioate linkage
  modified_base 9: mod_base = OTHER; note = Nucleotide with phosphorothioate linkage
  modified_base 10: mod_base = OTHER; note = Nucleotide with phosphorothioate linkage
  modified_base 11: mod_base = OTHER; note = Nucleotide with phosphorothioate linkage
  modified_base 12: mod_base = OTHER; note = Nucleotide with phosphorothioate linkage
  modified_base 13: mod_base = OTHER; note = Nucleotide with phosphorothioate linkage
  modified_base 14: mod_base = OTHER; note = Nucleotide with phosphorothioate linkage
  modified_base 15: mod_base = OTHER; note = Nucleotide with phosphorothioate linkage
  modified_base 16: mod_base = OTHER; note = beta-D-oxy locked nucleotide with phosphorothioate linkage
  modified_base 17: mod_base = OTHER; note = 5-methyl beta-D-oxy locked nucleotide with phosphorothioate linkage
  modified_base 18: mod_base = OTHER; note = beta-D-oxy locked nucleotide with phosphorothioate linkage
  modified_base 19: mod_base = OTHER; note = 5-methyl beta-D-oxy locked nucleotide with phosphorothioate linkage
gaaacttctctttactcac

SEQ ID NO: 513 - DNA, 17 bp, synthetic construct
  source 1..17: mol_type = other DNA
  modified_base 1: mod_base = OTHER; note = beta-D-oxy locked nucleotide with phosphorothioate linkage
  modified_base 2: mod_base = OTHER; note = beta-D-oxy locked nucleotide with phosphorothioate linkage
  modified_base 3: mod_base = OTHER; note = 5-methyl beta-D-oxy locked nucleotide with phosphorothioate linkage
  modified_base 4: mod_base = OTHER; note = beta-D-oxy locked nucleotide with phosphorothioate linkage
  modified_base 5: mod_base = OTHER; note = Nucleotide with phosphorothioate linkage
  modified_base 6: mod_base = OTHER; note = Nucleotide with phosphorothioate linkage
  modified_base 7: mod_base = OTHER; note = Nucleotide with phosphorothioate linkage
  modified_base 8: mod_base = OTHER; note = Nucleotide with phosphorothioate linkage
  modified_base 9: mod_base = OTHER; note = Nucleotide with phosphorothioate linkage
  modified_base 10: mod_base = OTHER; note = Nucleotide with phosphorothioate linkage
  modified_base 11: mod_base = OTHER; note = Nucleotide with phosphorothioate linkage
  modified_base 12: mod_base = OTHER; note = Nucleotide with phosphorothioate linkage
  modified_base 13: mod_base = OTHER; note = Nucleotide with phosphorothioate linkage
  modified_base 14: mod_base = OTHER; note = beta-D-oxy locked nucleotide with phosphorothioate linkage
  modified_base 15: mod_base = OTHER; note = 5-methyl beta-D-oxy locked nucleotide with phosphorothioate linkage
  modified_base 16: mod_base = OTHER; note = beta-D-oxy locked nucleotide with phosphorothioate linkage
  modified_base 17: mod_base = OTHER; note = 5-methyl beta-D-oxy locked nucleotide with phosphorothioate linkage
aacttctctttactcac

SEQ ID NO: 514 - DNA, 18 bp, synthetic construct
  source 1..18: mol_type = other DNA
  modified_base 1: mod_base = OTHER; note = beta-D-oxy locked nucleotide with phosphorothioate linkage
  modified_base 2: mod_base = OTHER; note = beta-D-oxy locked nucleotide with phosphorothioate linkage
  modified_base 3: mod_base = OTHER; note = beta-D-oxy locked nucleotide with phosphorothioate linkage
  modified_base 4: mod_base = OTHER; note = Nucleotide with phosphorothioate linkage
  modified_base 5: mod_base = OTHER; note = Nucleotide with phosphorothioate linkage
  modified_base 6: mod_base = OTHER; note = Nucleotide with phosphorothioate linkage
  modified_base 7: mod_base = OTHER; note = Nucleotide with phosphorothioate linkage
  modified_base 8: mod_base = OTHER; note = Nucleotide with phosphorothioate linkage
  modified_base 9: mod_base = OTHER; note = Nucleotide with phosphorothioate linkage
  modified_base 10: mod_base = OTHER; note = Nucleotide with phosphorothioate linkage
  modified_base 11: mod_base = OTHER; note = Nucleotide with phosphorothioate linkage
  modified_base 12: mod_base = OTHER; note = Nucleotide with phosphorothioate linkage
  modified_base 13: mod_base = OTHER; note = Nucleotide with phosphorothioate linkage
  modified_base 14: mod_base = OTHER; note = Nucleotide with phosphorothioate linkage
  modified_base 15: mod_base = OTHER; note = beta-D-oxy locked nucleotide with phosphorothioate linkage
  modified_base 16: mod_base = OTHER; note = 5-methyl beta-D-oxy locked nucleotide with phosphorothioate linkage
  modified_base 17: mod_base = OTHER; note = beta-D-oxy locked nucleotide with phosphorothioate linkage
  modified_base 18: mod_base = OTHER; note = 5-methyl beta-D-oxy locked nucleotide with phosphorothioate linkage
aaacttctctttactcac

SEQ ID NO: 515 - DNA, 20 bp, synthetic construct
  source 1..20: mol_type = other DNA
  modified_base 1: mod_base = OTHER; note = beta-D-oxy locked nucleotide with phosphorothioate linkage
  modified_base 2: mod_base = OTHER; note = beta-D-oxy locked nucleotide with phosphorothioate linkage
  modified_base 3: mod_base = OTHER; note = Nucleotide with phosphorothioate linkage
  modified_base 4: mod_base = OTHER; note = Nucleotide with phosphorothioate linkage
  modified_base 5: mod_base = OTHER; note = Nucleotide with phosphorothioate linkage
  modified_base 6: mod_base = OTHER; note = Nucleotide with phosphorothioate linkage
  modified_base 7: mod_base = OTHER; note = Nucleotide with phosphorothioate linkage
  modified_base 8: mod_base = OTHER; note = Nucleotide with phosphorothioate linkage
  modified_base 9: mod_base = OTHER; note = Nucleotide with phosphorothioate linkage
  modified_base 10: mod_base = OTHER; note = Nucleotide with phosphorothioate linkage
  modified_base 11: mod_base = OTHER; note = Nucleotide with phosphorothioate linkage
  modified_base 12: mod_base = OTHER; note = Nucleotide with phosphorothioate linkage
  modified_base 13: mod_base = OTHER; note = Nucleotide with phosphorothioate linkage
  modified_base 14: mod_base = OTHER; note = Nucleotide with phosphorothioate linkage
  modified_base 15: mod_base = OTHER; note = Nucleotide with phosphorothioate linkage
  modified_base 16: mod_base = OTHER; note = Nucleotide with phosphorothioate linkage
  modified_base 17: mod_base = OTHER; note = Nucleotide with phosphorothioate linkage
  modified_base 18: mod_base = OTHER; note = Nucleotide with phosphorothioate linkage
  modified_base 19: mod_base = OTHER; note = beta-D-oxy locked nucleotide with phosphorothioate linkage
  modified_base 20: mod_base = OTHER; note = 5-methyl beta-D-oxy locked nucleotide with phosphorothioate linkage
tgaaacttctctttactcac

SEQ ID NO: 516 - DNA, 17 bp, synthetic construct
  source 1..17: mol_type = other DNA
  modified_base 1: mod_base = OTHER; note = beta-D-oxy locked nucleotide with phosphorothioate linkage
  modified_base 2: mod_base = OTHER; note = beta-D-oxy locked nucleotide with phosphorothioate linkage
  modified_base 3: mod_base = OTHER; note = beta-D-oxy locked nucleotide with phosphorothioate linkage
  modified_base 4: mod_base = OTHER; note = 5-methyl beta-D-oxy locked nucleotide with phosphorothioate linkage
  modified_base 5: mod_base = OTHER; note = Nucleotide with phosphorothioate linkage
  modified_base 6: mod_base = OTHER; note = Nucleotide with phosphorothioate linkage
  modified_base 7: mod_base = OTHER; note = Nucleotide with phosphorothioate linkage
  modified_base 8: mod_base = OTHER; note = Nucleotide with phosphorothioate linkage
  modified_base 9: mod_base = OTHER; note = Nucleotide with phosphorothioate linkage
  modified_base 10: mod_base = OTHER; note = Nucleotide with phosphorothioate linkage
  modified_base 11: mod_base = OTHER; note = Nucleotide with phosphorothioate linkage
  modified_base 12: mod_base = OTHER; note = Nucleotide with phosphorothioate linkage
  modified_base 13: mod_base = OTHER; note = Nucleotide with phosphorothioate linkage
  modified_base 14: mod_base = OTHER; note = 5-methyl beta-D-oxy locked nucleotide with phosphorothioate linkage
  modified_base 15: mod_base = OTHER; note = beta-D-oxy locked nucleotide with phosphorothioate linkage
  modified_base 16: mod_base = OTHER; note = 5-methyl beta-D-oxy locked nucleotide with phosphorothioate linkage
  modified_base 17: mod_base = OTHER; note = beta-D-oxy locked nucleotide with phosphorothioate linkage
aaacttctctttactca

SEQ ID NO: 517 - DNA, 18 bp, synthetic construct
  source 1..18: mol_type = other DNA
  modified_base 1: mod_base = OTHER; note = beta-D-oxy locked nucleotide with phosphorothioate linkage
  modified_base 2: mod_base = OTHER; note = beta-D-oxy locked nucleotide with phosphorothioate linkage
  modified_base 3: mod_base = OTHER; note = Nucleotide with phosphorothioate linkage
  modified_base 4: mod_base = OTHER; note = Nucleotide with phosphorothioate linkage
  modified_base 5: mod_base = OTHER; note = Nucleotide with phosphorothioate linkage
  modified_base 6: mod_base = OTHER; note = Nucleotide with phosphorothioate linkage
  modified_base 7: mod_base = OTHER; note = Nucleotide with phosphorothioate linkage
  modified_base 8: mod_base = OTHER; note = Nucleotide with phosphorothioate linkage
  modified_base 9: mod_base = OTHER; note = Nucleotide with phosphorothioate linkage
  modified_base 10: mod_base = OTHER; note = Nucleotide with phosphorothioate linkage
  modified_base 11: mod_base = OTHER; note = Nucleotide with phosphorothioate linkage
  modified_base 12: mod_base = OTHER; note = Nucleotide with phosphorothioate linkage
  modified_base 13: mod_base = OTHER; note = Nucleotide with phosphorothioate linkage
  modified_base 14: mod_base = OTHER; note = Nucleotide with phosphorothioate linkage
  modified_base 15: mod_base = OTHER; note = Nucleotide with phosphorothioate linkage
  modified_base 16: mod_base = OTHER; note = Nucleotide with phosphorothioate linkage
  modified_base 17: mod_base = OTHER; note = 5-methyl beta-D-oxy locked nucleotide with phosphorothioate linkage
  modified_base 18: mod_base = OTHER; note = beta-D-oxy locked nucleotide with phosphorothioate linkage
gaaacttctctttactca

SEQ ID NO: 518 - DNA, 19 bp, synthetic construct
  source 1..19: mol_type = other DNA
  modified_base 1: mod_base = OTHER; note = beta-D-oxy locked nucleotide with phosphorothioate linkage
  modified_base 2: mod_base = OTHER; note = beta-D-oxy locked nucleotide with phosphorothioate linkage
  modified_base 3: mod_base = OTHER; note = beta-D-oxy locked nucleotide with phosphorothioate linkage
  modified_base 4: mod_base = OTHER; note = Nucleotide with phosphorothioate linkage
  modified_base 5: mod_base = OTHER; note = Nucleotide with phosphorothioate linkage
  modified_base 6: mod_base = OTHER; note = Nucleotide with phosphorothioate linkage
  modified_base 7: mod_base = OTHER; note = Nucleotide with phosphorothioate linkage
  modified_base 8: mod_base = OTHER; note = Nucleotide with phosphorothioate linkage
  modified_base 9: mod_base = OTHER; note = Nucleotide with phosphorothioate linkage
  modified_base 10: mod_base = OTHER; note = Nucleotide with phosphorothioate linkage
  modified_base 11: mod_base = OTHER; note = Nucleotide with phosphorothioate linkage
  modified_base 12: mod_base = OTHER; note = Nucleotide with phosphorothioate linkage
  modified_base 13: mod_base = OTHER; note = Nucleotide with phosphorothioate linkage
  modified_base 14: mod_base = OTHER; note = Nucleotide with phosphorothioate linkage
  modified_base 15: mod_base = OTHER; note = Nucleotide with phosphorothioate linkage
  modified_base 16: mod_base = OTHER; note = Nucleotide with phosphorothioate linkage
  modified_base 17: mod_base = OTHER; note = beta-D-oxy locked nucleotide with phosphorothioate linkage
  modified_base 18: mod_base = OTHER; note = 5-methyl beta-D-oxy locked nucleotide with phosphorothioate linkage
  modified_base 19: mod_base = OTHER; note = beta-D-oxy locked nucleotide with phosphorothioate linkage
tgaaacttctctttactca

SEQ ID NO: 519 - DNA, 17 bp, synthetic construct
  source 1..17: mol_type = other DNA
  modified_base 1: mod_base = OTHER; note = beta-D-oxy locked nucleotide with phosphorothioate linkage
  modified_base 2: mod_base = OTHER; note = beta-D-oxy locked nucleotide with phosphorothioate linkage
  modified_base 3: mod_base = OTHER; note = beta-D-oxy locked nucleotide with phosphorothioate linkage
  modified_base 4: mod_base = OTHER; note = beta-D-oxy locked nucleotide with phosphorothioate linkage
  modified_base 5: mod_base = OTHER; note = Nucleotide with phosphorothioate linkage
  modified_base 6: mod_base = OTHER; note = Nucleotide with phosphorothioate linkage
  modified_base 7: mod_base = OTHER; note = Nucleotide with phosphorothioate linkage
  modified_base 8: mod_base = OTHER; note = Nucleotide with phosphorothioate linkage
  modified_base 9: mod_base = OTHER; note = Nucleotide with phosphorothioate linkage
  modified_base 10: mod_base = OTHER; note = Nucleotide with phosphorothioate linkage
  modified_base 11: mod_base = OTHER; note = Nucleotide with phosphorothioate linkage
  modified_base 12: mod_base = OTHER; note = Nucleotide with phosphorothioate linkage
  modified_base 13: mod_base = OTHER; note = Nucleotide with phosphorothioate linkage
  modified_base 14: mod_base = OTHER; note = Nucleotide with phosphorothioate linkage
  modified_base 15: mod_base = OTHER; note = 5-methyl beta-D-oxy locked nucleotide with phosphorothioate linkage
  modified_base 16: mod_base = OTHER; note = beta-D-oxy locked nucleotide with phosphorothioate linkage
  modified_base 17: mod_base = OTHER; note = 5-methyl beta-D-oxy locked nucleotide with phosphorothioate linkage
gaaacttctctttactc

SEQ ID NO: 520 - DNA, 18 bp, synthetic construct
  source 1..18: mol_type = other DNA
  modified_base 1: mod_base = OTHER; note = beta-D-oxy locked nucleotide with phosphorothioate linkage
  modified_base 2: mod_base = OTHER; note = beta-D-oxy locked nucleotide with phosphorothioate linkage
  modified_base 3: mod_base = OTHER; note = beta-D-oxy locked nucleotide with phosphorothioate linkage
  modified_base 4: mod_base = OTHER; note = Nucleotide with phosphorothioate linkage
  modified_base 5: mod_base = OTHER; note = Nucleotide with phosphorothioate linkage
  modified_base 6: mod_base = OTHER; note = Nucleotide with phosphorothioate linkage
  modified_base 7: mod_base = OTHER; note = Nucleotide with phosphorothioate linkage
  modified_base 8: mod_base = OTHER; note = Nucleotide with phosphorothioate linkage
  modified_base 9: mod_base = OTHER; note = Nucleotide with phosphorothioate linkage
  modified_base 10: mod_base = OTHER; note = Nucleotide with phosphorothioate linkage
  modified_base 11: mod_base = OTHER; note = Nucleotide with phosphorothioate linkage
  modified_base 12: mod_base = OTHER; note = Nucleotide with phosphorothioate linkage
  modified_base 13: mod_base = OTHER; note = Nucleotide with phosphorothioate linkage
  modified_base 14: mod_base = OTHER; note = Nucleotide with phosphorothioate linkage
  modified_base 15: mod_base = OTHER; note = Nucleotide with phosphorothioate linkage
  modified_base 16: mod_base = OTHER; note = 5-methyl beta-D-oxy locked nucleotide with phosphorothioate linkage
  modified_base 17: mod_base = OTHER; note = beta-D-oxy locked nucleotide with phosphorothioate linkage
  modified_base 18: mod_base = OTHER; note = 5-methyl beta-D-oxy locked nucleotide with phosphorothioate linkage
tgaaacttctctttactc

SEQ ID NO: 521 - DNA, 17 bp, synthetic construct
  source 1..17: mol_type = other DNA
  modified_base 1: mod_base = OTHER; note = beta-D-oxy locked nucleotide with phosphorothioate linkage
  modified_base 2: mod_base = OTHER; note = beta-D-oxy locked nucleotide with phosphorothioate linkage
  modified_base 3: mod_base = OTHER; note = beta-D-oxy locked nucleotide with phosphorothioate linkage
  modified_base 4: mod_base = OTHER; note = Nucleotide with phosphorothioate linkage
  modified_base 5: mod_base = OTHER; note = Nucleotide with phosphorothioate linkage
  modified_base 6: mod_base = OTHER; note = Nucleotide with phosphorothioate linkage
  modified_base 7: mod_base = OTHER; note = Nucleotide with phosphorothioate linkage
  modified_base 8: mod_base = OTHER; note = Nucleotide with phosphorothioate linkage
  modified_base 9: mod_base = OTHER; note = Nucleotide with phosphorothioate linkage
  modified_base 10: mod_base = OTHER; note = Nucleotide with phosphorothioate linkage
  modified_base 11: mod_base = OTHER; note = Nucleotide with phosphorothioate linkage
  modified_base 12: mod_base = OTHER; note = Nucleotide with phosphorothioate linkage
  modified_base 13: mod_base = OTHER; note = Nucleotide with phosphorothioate linkage
  modified_base 14: mod_base = OTHER; note = Nucleotide with phosphorothioate linkage
  modified_base 15: mod_base = OTHER; note = Nucleotide with phosphorothioate linkage
  modified_base 16: mod_base = OTHER; note = 5-methyl beta-D-oxy locked nucleotide with phosphorothioate linkage
  modified_base 17: mod_base = OTHER; note = beta-D-oxy locked nucleotide with phosphorothioate linkage
tgaaacttctctttact

SEQ ID NO: 522 - DNA, 18 bp, synthetic construct
  source 1..18: mol_type = other DNA
  modified_base 1: mod_base = OTHER; note = beta-D-oxy locked nucleotide with phosphorothioate linkage
  modified_base 2: mod_base = OTHER; note = beta-D-oxy locked nucleotide with phosphorothioate linkage
  modified_base 3: mod_base = OTHER; note = beta-D-oxy locked nucleotide with phosphorothioate linkage
  modified_base 4: mod_base = OTHER; note = Nucleotide with phosphorothioate linkage
  modified_base 5: mod_base = OTHER; note = Nucleotide with phosphorothioate linkage
  modified_base 6: mod_base = OTHER; note = Nucleotide with phosphorothioate linkage
  modified_base 7: mod_base = OTHER; note = Nucleotide with phosphorothioate linkage
  modified_base 8: mod_base = OTHER; note = Nucleotide with phosphorothioate linkage
  modified_base 9: mod_base = OTHER; note = Nucleotide with phosphorothioate linkage
  modified_base 10: mod_base = OTHER; note = Nucleotide with phosphorothioate linkage
  modified_base 11: mod_base = OTHER; note = Nucleotide with phosphorothioate linkage
  modified_base 12: mod_base = OTHER; note = Nucleotide with phosphorothioate linkage
  modified_base 13: mod_base = OTHER; note = Nucleotide with phosphorothioate linkage
  modified_base 14: mod_base = OTHER; note = Nucleotide with phosphorothioate linkage
  modified_base 15: mod_base = OTHER; note = Nucleotide with phosphorothioate linkage
  modified_base 16: mod_base = OTHER; note = Nucleotide with phosphorothioate linkage
  modified_base 17: mod_base = OTHER; note = 5-methyl beta-D-oxy locked nucleotide with phosphorothioate linkage
  modified_base 18: mod_base = OTHER; note = beta-D-oxy locked nucleotide with phosphorothioate linkage
gtgaaacttctctttact

SEQ ID NO: 523 - DNA, 18 bp, synthetic construct
  source 1..18: mol_type = other DNA
  modified_base 1: mod_base = OTHER; note = beta-D-oxy locked nucleotide with phosphorothioate linkage
  modified_base 2: mod_base = OTHER; note = beta-D-oxy locked nucleotide with phosphorothioate linkage
  modified_base 3: mod_base = OTHER; note = 5-methyl beta-D-oxy locked nucleotide with phosphorothioate linkage
  modified_base 4: mod_base = OTHER; note = Nucleotide with phosphorothioate linkage
  modified_base 5: mod_base = OTHER; note = Nucleotide with phosphorothioate linkage
  modified_base 6: mod_base = OTHER; note = Nucleotide with phosphorothioate linkage
  modified_base 7: mod_base = OTHER; note = Nucleotide with phosphorothioate linkage
  modified_base 8: mod_base = OTHER; note = Nucleotide with phosphorothioate linkage
  modified_base 9: mod_base = OTHER; note = Nucleotide with phosphorothioate linkage
  modified_base 10: mod_base = OTHER; note = Nucleotide with phosphorothioate linkage
  modified_base 11: mod_base = OTHER; note = Nucleotide with phosphorothioate linkage
  modified_base 12: mod_base = OTHER; note = Nucleotide with phosphorothioate linkage
  modified_base 13: mod_base = OTHER; note = Nucleotide with phosphorothioate linkage
  modified_base 14: mod_base = OTHER; note = Nucleotide with phosphorothioate linkage
  modified_base 15: mod_base = OTHER; note = Nucleotide with phosphorothioate linkage
  modified_base 16: mod_base = OTHER; note = 5-methyl beta-D-oxy locked nucleotide with phosphorothioate linkage
  modified_base 17: mod_base = OTHER; note = 5-methyl beta-D-oxy locked nucleotide with phosphorothioate linkage
  modified_base 18: mod_base = OTHER; note = beta-D-oxy locked nucleotide with phosphorothioate linkage
tacagactcaaaaaccca

SEQ ID NO: 524 - DNA, 17 bp, synthetic construct
  source 1..17: mol_type = other DNA
  modified_base 1: mod_base = OTHER; note = beta-D-oxy locked nucleotide with phosphorothioate linkage
  modified_base 2: mod_base = OTHER; note = 5-methyl beta-D-oxy locked nucleotide with phosphorothioate linkage
  modified_base 3: mod_base = OTHER; note = beta-D-oxy locked nucleotide with phosphorothioate linkage
  modified_base 4: mod_base = OTHER; note = Nucleotide with phosphorothioate linkage
  modified_base 5: mod_base = OTHER; note = Nucleotide with phosphorothioate linkage
  modified_base 6: mod_base = OTHER; note = Nucleotide with phosphorothioate linkage
  modified_base 7: mod_base = OTHER; note = Nucleotide with phosphorothioate linkage
  modified_base 8: mod_base = OTHER; note = Nucleotide with phosphorothioate linkage
  modified_base 9: mod_base = OTHER; note = Nucleotide with phosphorothioate linkage
  modified_base 10: mod_base = OTHER; note = Nucleotide with phosphorothioate linkage
  modified_base 11: mod_base = OTHER; note = Nucleotide with phosphorothioate linkage
  modified_base 12: mod_base = OTHER; note = Nucleotide with phosphorothioate linkage
  modified_base 13: mod_base = OTHER; note = Nucleotide with phosphorothioate linkage
  modified_base 14: mod_base = OTHER; note = Nucleotide with phosphorothioate linkage
  modified_base 15: mod_base = OTHER; note = Nucleotide with phosphorothioate linkage
  modified_base 16: mod_base = OTHER; note = 5-methyl beta-D-oxy locked nucleotide with phosphorothioate linkage
  modified_base 17: mod_base = OTHER; note = beta-D-oxy locked nucleotide with phosphorothioate linkage
acagactcaaaaaccca

SEQ ID NO: 525 - DNA, 19 bp, synthetic construct
  source 1..19: mol_type = other DNA
  modified_base 1: mod_base = OTHER; note = beta-D-oxy locked nucleotide with phosphorothioate linkage
  modified_base 2: mod_base = OTHER; note = beta-D-oxy locked nucleotide with phosphorothioate linkage
  modified_base 3: mod_base = OTHER; note = beta-D-oxy locked nucleotide with phosphorothioate linkage
  modified_base 4: mod_base = OTHER; note = Nucleotide with phosphorothioate linkage
  modified_base 5: mod_base = OTHER; note = Nucleotide with phosphorothioate linkage
  modified_base 6: mod_base = OTHER; note = Nucleotide with phosphorothioate linkage
  modified_base 7: mod_base = OTHER; note = Nucleotide with phosphorothioate linkage
  modified_base 8: mod_base = OTHER; note = Nucleotide with phosphorothioate linkage
  modified_base 9: mod_base = OTHER; note = Nucleotide with phosphorothioate linkage
  modified_base 10: mod_base = OTHER; note = Nucleotide with phosphorothioate linkage
  modified_base 11: mod_base = OTHER; note = Nucleotide with phosphorothioate linkage
  modified_base 12: mod_base = OTHER; note = Nucleotide with phosphorothioate linkage
  modified_base 13: mod_base = OTHER; note = Nucleotide with phosphorothioate linkage
  modified_base 14: mod_base = OTHER; note = Nucleotide with phosphorothioate linkage
  modified_base 15: mod_base = OTHER; note = Nucleotide with phosphorothioate linkage
  modified_base 16: mod_base = OTHER; note = Nucleotide with phosphorothioate linkage
  modified_base 17: mod_base = OTHER; note = Nucleotide with phosphorothioate linkage
  modified_base 18: mod_base = OTHER; note = 5-methyl beta-D-oxy locked nucleotide with phosphorothioate linkage
  modified_base 19: mod_base = OTHER; note = beta-D-oxy locked nucleotide with phosphorothioate linkage
atacagactcaaaaaccca

SEQ ID NO: 526 - DNA, 19 bp, synthetic construct
  source 1..19: mol_type = other DNA
  modified_base 1: mod_base = OTHER; note = 5-methyl beta-D-oxy locked nucleotide with phosphorothioate linkage
  modified_base 2: mod_base = OTHER; note = beta-D-oxy locked nucleotide with phosphorothioate linkage
  modified_base 3: mod_base = OTHER; note = Nucleotide with phosphorothioate linkage
  modified_base 4: mod_base = OTHER; note = Nucleotide with phosphorothioate linkage
  modified_base 5: mod_base = OTHER; note = Nucleotide with phosphorothioate linkage
  modified_base 6: mod_base = OTHER; note = Nucleotide with phosphorothioate linkage
  modified_base 7: mod_base = OTHER; note = Nucleotide with phosphorothioate linkage
  modified_base 8: mod_base = OTHER; note = Nucleotide with phosphorothioate linkage
  modified_base 9: mod_base = OTHER; note = Nucleotide with phosphorothioate linkage
  modified_base 10: mod_base = OTHER; note = Nucleotide with phosphorothioate linkage
  modified_base 11: mod_base = OTHER; note = Nucleotide with phosphorothioate linkage
  modified_base 12: mod_base = OTHER; note = Nucleotide with phosphorothioate linkage
  modified_base 13: mod_base = OTHER; note = Nucleotide with phosphorothioate linkage
  modified_base 14: mod_base = OTHER; note = Nucleotide with phosphorothioate linkage
  modified_base 15: mod_base = OTHER; note = Nucleotide with phosphorothioate linkage
  modified_base 16: mod_base = OTHER; note = Nucleotide with phosphorothioate linkage
  modified_base 17: mod_base = OTHER; note = 5-methyl beta-D-oxy locked nucleotide with phosphorothioate linkage
  modified_base 18: mod_base = OTHER; note = 5-methyl beta-D-oxy locked nucleotide with phosphorothioate linkage
  modified_base 19: mod_base = OTHER; note = 5-methyl beta-D-oxy locked nucleotide with phosphorothioate linkage
catacagactcaaaaaccc

SEQ ID NO: 527 - DNA, 18 bp, synthetic construct
  source 1..18: mol_type = other DNA
  modified_base 1: mod_base = OTHER; note = beta-D-oxy locked nucleotide with phosphorothioate linkage
  modified_base 2: mod_base = OTHER; note = beta-D-oxy locked nucleotide with phosphorothioate linkage
  modified_base 3: mod_base = OTHER; note = beta-D-oxy locked nucleotide with phosphorothioate linkage
  modified_base 4: mod_base = OTHER; note = Nucleotide with phosphorothioate linkage
  modified_base 5: mod_base = OTHER; note = Nucleotide with phosphorothioate linkage
  modified_base 6: mod_base = OTHER; note = Nucleotide with phosphorothioate linkage
  modified_base 7: mod_base = OTHER; note = Nucleotide with phosphorothioate linkage
  modified_base 8: mod_base = OTHER; note = Nucleotide with phosphorothioate linkage
  modified_base 9: mod_base = OTHER; note = Nucleotide with phosphorothioate linkage
  modified_base 10: mod_base = OTHER; note = Nucleotide with phosphorothioate linkage
  modified_base 11: mod_base = OTHER; note = Nucleotide with phosphorothioate linkage
  modified_base 12: mod_base = OTHER; note = Nucleotide with phosphorothioate linkage
  modified_base 13: mod_base = OTHER; note = Nucleotide with phosphorothioate linkage
  modified_base 14: mod_base = OTHER; note = Nucleotide with phosphorothioate linkage
  modified_base 15: mod_base = OTHER; note = Nucleotide with phosphorothioate linkage
  modified_base 16: mod_base = OTHER; note = Nucleotide with phosphorothioate linkage
  modified_base 17: mod_base = OTHER; note = 5-methyl beta-D-oxy locked nucleotide with phosphorothioate linkage
  modified_base 18: mod_base = OTHER; note = 5-methyl beta-D-oxy locked nucleotide with phosphorothioate linkage
atacagactcaaaaaccc

SEQ ID NO: 528 - DNA, 17 bp, synthetic construct
  source 1..17: mol_type = other DNA
  modified_base 1: mod_base = OTHER; note = beta-D-oxy locked nucleotide with phosphorothioate linkage
  modified_base 2: mod_base = OTHER; note = beta-D-oxy locked nucleotide with phosphorothioate linkage
  modified_base 3: mod_base = OTHER; note = Nucleotide with phosphorothioate linkage
  modified_base 4: mod_base = OTHER; note = Nucleotide with phosphorothioate linkage
  modified_base 5: mod_base = OTHER; note = Nucleotide with phosphorothioate linkage
  modified_base 6: mod_base = OTHER; note = Nucleotide with phosphorothioate linkage
  modified_base 7: mod_base = OTHER; note = Nucleotide with phosphorothioate linkage
  modified_base 8: mod_base = OTHER; note = Nucleotide with phosphorothioate linkage
  modified_base 9: mod_base = OTHER; note = Nucleotide with phosphorothioate linkage
  modified_base 10: mod_base = OTHER; note = Nucleotide with phosphorothioate linkage
  modified_base 11: mod_base = OTHER; note = Nucleotide with phosphorothioate linkage
  modified_base 12: mod_base = OTHER; note = Nucleotide with phosphorothioate linkage
  modified_base 13: mod_base = OTHER; note = Nucleotide with phosphorothioate linkage
  modified_base 14: mod_base = OTHER; note = Nucleotide with phosphorothioate linkage
  modified_base 15: mod_base = OTHER; note = 5-methyl beta-D-oxy locked nucleotide with phosphorothioate linkage
  modified_base 16: mod_base = OTHER; note = 5-methyl beta-D-oxy locked nucleotide with phosphorothioate linkage
  modified_base 17: mod_base = OTHER; note = 5-methyl beta-D-oxy locked nucleotide with phosphorothioate linkage
tacagactcaaaaaccc

SEQ ID NO: 529 - DNA, 18 bp, synthetic construct
  source 1..18: mol_type = other DNA
  modified_base 1: mod_base = OTHER; note = 5-methyl beta-D-oxy locked nucleotide with phosphorothioate linkage
  modified_base 2: mod_base = OTHER; note = beta-D-oxy locked nucleotide with phosphorothioate linkage
  modified_base 3: mod_base = OTHER; note = Nucleotide with phosphorothioate linkage
  modified_base 4: mod_base = OTHER; note = Nucleotide with phosphorothioate linkage
  modified_base 5: mod_base = OTHER; note = Nucleotide with phosphorothioate linkage
  modified_base 6: mod_base = OTHER; note = Nucleotide with phosphorothioate linkage
  modified_base 7: mod_base = OTHER; note = Nucleotide with phosphorothioate linkage
  modified_base 8: mod_base = OTHER; note = Nucleotide with phosphorothioate linkage
  modified_base 9: mod_base = OTHER; note = Nucleotide with phosphorothioate linkage
  modified_base 10: mod_base = OTHER; note = Nucleotide with phosphorothioate linkage
  modified_base 11: mod_base = OTHER; note = Nucleotide with phosphorothioate linkage
  modified_base 12: mod_base = OTHER; note = Nucleotide with phosphorothioate linkage
  modified_base 13: mod_base = OTHER; note = Nucleotide with phosphorothioate linkage
  modified_base 14: mod_base = OTHER; note = Nucleotide with phosphorothioate linkage
  modified_base 15: mod_base = OTHER; note = beta-D-oxy locked nucleotide with phosphorothioate linkage
  modified_base 16: mod_base = OTHER; note = beta-D-oxy locked nucleotide with phosphorothioate linkage
  modified_base 17: mod_base = OTHER; note = 5-methyl beta-D-oxy locked nucleotide with phosphorothioate linkage
  modified_base 18: mod_base = OTHER; note = 5-methyl beta-D-oxy locked nucleotide with phosphorothioate linkage
catacagactcaaaaacc

SEQ ID NO: 530 - DNA, 17 bp, synthetic construct
  source 1..17: mol_type = other DNA
  modified_base 1: mod_base = OTHER; note = beta-D-oxy locked nucleotide with phosphorothioate linkage
  modified_base 2: mod_base = OTHER; note = beta-D-oxy locked nucleotide with phosphorothioate linkage
  modified_base 3: mod_base = OTHER; note = beta-D-oxy locked nucleotide with phosphorothioate linkage
  modified_base 4: mod_base = OTHER; note = 5-methyl beta-D-oxy locked nucleotide with phosphorothioate linkage
  modified_base 5: mod_base = OTHER; note = Nucleotide with phosphorothioate linkage
  modified_base 6: mod_base = OTHER; note = Nucleotide with phosphorothioate linkage
  modified_base 7: mod_base = OTHER; note = Nucleotide with phosphorothioate linkage
  modified_base 8: mod_base = OTHER; note = Nucleotide with phosphorothioate linkage
  modified_base 9: mod_base = OTHER; note = Nucleotide with phosphorothioate linkage
  modified_base 10: mod_base = OTHER; note = Nucleotide with phosphorothioate linkage
  modified_base 11: mod_base = OTHER; note = Nucleotide with phosphorothioate linkage
  modified_base 12: mod_base = OTHER; note = Nucleotide with phosphorothioate linkage
  modified_base 13: mod_base = OTHER; note = Nucleotide with phosphorothioate linkage
  modified_base 14: mod_base = OTHER; note = beta-D-oxy locked nucleotide with phosphorothioate linkage
  modified_base 15: mod_base = OTHER; note = beta-D-oxy locked nucleotide with phosphorothioate linkage
  modified_base 16: mod_base = OTHER; note = 5-methyl beta-D-oxy locked nucleotide with phosphorothioate linkage
  modified_base 17: mod_base = OTHER; note = 5-methyl beta-D-oxy locked nucleotide with phosphorothioate linkage
atacagactcaaaaacc

SEQ ID NO: 531 - DNA, 18 bp, synthetic construct
  source 1..18: mol_type = other DNA
  modified_base 1: mod_base = OTHER; note = beta-D-oxy locked nucleotide with phosphorothioate linkage
  modified_base 2: mod_base = OTHER; note = 5-methyl beta-D-oxy locked nucleotide with phosphorothioate linkage
  modified_base 3: mod_base = OTHER; note = beta-D-oxy locked nucleotide with phosphorothioate linkage
  modified_base 4: mod_base = OTHER; note = beta-D-oxy locked nucleotide with phosphorothioate linkage
  modified_base 5: mod_base = OTHER; note = Nucleotide with phosphorothioate linkage
  modified_base 6: mod_base = OTHER; note = Nucleotide with phosphorothioate linkage
  modified_base 7: mod_base = OTHER; note = Nucleotide with phosphorothioate linkage
  modified_base 8: mod_base = OTHER; note = Nucleotide with phosphorothioate linkage
  modified_base 9: mod_base = OTHER; note = Nucleotide with phosphorothioate linkage
  modified_base 10: mod_base = OTHER; note = Nucleotide with phosphorothioate linkage
  modified_base 11: mod_base = OTHER; note = Nucleotide with phosphorothioate linkage
  modified_base 12: mod_base = OTHER; note = Nucleotide with phosphorothioate linkage
  modified_base 13: mod_base = OTHER; note = Nucleotide with phosphorothioate linkage
  modified_base 14: mod_base = OTHER; note = Nucleotide with phosphorothioate linkage
  modified_base 15: mod_base = OTHER; note = beta-D-oxy locked nucleotide with phosphorothioate linkage
  modified_base 16: mod_base = OTHER; note = beta-D-oxy locked nucleotide with phosphorothioate linkage
  modified_base 17: mod_base = OTHER; note = beta-D-oxy locked nucleotide with phosphorothioate linkage
  modified_base 18: mod_base = OTHER; note = 5-methyl beta-D-oxy locked nucleotide with phosphorothioate linkage
tcatacagactcaaaaac

SEQ ID NO: 532 - DNA, 19 bp, synthetic construct
  source 1..19: mol_type = other DNA
  modified_base 1: mod_base = OTHER; note = beta-D-oxy locked nucleotide with phosphorothioate linkage
  modified_base 2: mod_base = OTHER; note = beta-D-oxy locked nucleotide with phosphorothioate linkage
  modified_base 3: mod_base = OTHER; note = 5-methyl beta-D-oxy locked nucleotide with phosphorothioate linkage
  modified_base 4: mod_base = OTHER; note = beta-D-oxy locked nucleotide with phosphorothioate linkage
  modified_base 5: mod_base = OTHER; note = Nucleotide with phosphorothioate linkage
  modified_base 6: mod_base = OTHER; note = Nucleotide with phosphorothioate linkage
  modified_base 7: mod_base = OTHER; note = Nucleotide with phosphorothioate linkage
  modified_base 8: mod_base = OTHER; note = Nucleotide with phosphorothioate linkage
  modified_base 9: mod_base = OTHER; note = Nucleotide with phosphorothioate linkage
  modified_base 10: mod_base = OTHER; note = Nucleotide with phosphorothioate linkage
  modified_base 11: mod_base = OTHER; note = Nucleotide with phosphorothioate linkage
  modified_base 12: mod_base = OTHER; note = Nucleotide with phosphorothioate linkage
  modified_base 13: mod_base = OTHER; note = Nucleotide with phosphorothioate linkage
  modified_base 14: mod_base = OTHER; note = Nucleotide with phosphorothioate linkage
  modified_base 15: mod_base = OTHER; note = Nucleotide with phosphorothioate linkage
  modified_base 16: mod_base = OTHER; note = beta-D-oxy locked nucleotide with phosphorothioate linkage
  modified_base 17: mod_base = OTHER; note = beta-D-oxy locked nucleotide with phosphorothioate linkage
  modified_base 18: mod_base = OTHER; note = beta-D-oxy locked nucleotide with phosphorothioate linkage
  modified_base 19: mod_base = OTHER; note = 5-methyl beta-D-oxy locked nucleotide with phosphorothioate linkage
atcatacagactcaaaaac

SEQ ID NO: 533 - DNA, 16 bp, synthetic construct
  source 1..16: mol_type = other DNA
  modified_base 1: mod_base = OTHER; note = beta-D-oxy locked nucleotide with phosphorothioate linkage
  modified_base 2: mod_base = OTHER; note = 5-methyl beta-D-oxy locked nucleotide with phosphorothioate linkage
  modified_base 3: mod_base = OTHER; note = 5-methyl beta-D-oxy locked nucleotide with phosphorothioate linkage
  modified_base 4: mod_base = OTHER; note = Nucleotide with phosphorothioate linkage
  modified_base 5: mod_base = OTHER; note = Nucleotide with phosphorothioate linkage
  modified_base 6: mod_base = OTHER; note = Nucleotide with phosphorothioate linkage
  modified_base 7: mod_base = OTHER; note = Nucleotide with phosphorothioate linkage
  modified_base 8: mod_base = OTHER; note = Nucleotide with phosphorothioate linkage
  modified_base 9: mod_base = OTHER; note = Nucleotide with phosphorothioate linkage
  modified_base 10: mod_base = OTHER; note = Nucleotide with phosphorothioate linkage
  modified_base 11: mod_base = OTHER; note = Nucleotide with phosphorothioate linkage
  modified_base 12: mod_base = OTHER; note = Nucleotide with phosphorothioate linkage
  modified_base 13: mod_base = OTHER; note = Nucleotide with phosphorothioate linkage
  modified_base 14: mod_base = OTHER; note = Nucleotide with phosphorothioate linkage
  modified_base 15: mod_base = OTHER; note = beta-D-oxy locked nucleotide with phosphorothioate linkage
  modified_base 16: mod_base = OTHER; note = beta-D-oxy locked nucleotide with phosphorothioate linkage
acccttatcatacaga

SEQ ID NO: 534 - DNA, 16 bp, synthetic construct
  source 1..16: mol_type = other DNA
  modified_base 1: mod_base = OTHER; note = beta-D-oxy locked nucleotide with phosphorothioate linkage
  modified_base 2: mod_base = OTHER; note = beta-D-oxy locked nucleotide with phosphorothioate linkage
  modified_base 3: mod_base = OTHER; note = Nucleotide with phosphorothioate linkage
  modified_base 4: mod_base = OTHER; note = Nucleotide with phosphorothioate linkage
  modified_base 5: mod_base = OTHER; note = Nucleotide with phosphorothioate linkage
  modified_base 6: mod_base = OTHER; note = Nucleotide with phosphorothioate linkage
  modified_base 7: mod_base = OTHER; note = Nucleotide with phosphorothioate linkage
  modified_base 8: mod_base = OTHER; note = Nucleotide with phosphorothioate linkage
  modified_base 9: mod_base = OTHER; note = Nucleotide with phosphorothioate linkage
  modified_base 10: mod_base = OTHER; note = Nucleotide with phosphorothioate linkage
  modified_base 11: mod_base = OTHER; note = Nucleotide with phosphorothioate linkage
  modified_base 12: mod_base = OTHER; note = Nucleotide with phosphorothioate linkage
  modified_base 13: mod_base = OTHER; note = Nucleotide with phosphorothioate linkage
  modified_base 14: mod_base = OTHER; note = Nucleotide with phosphorothioate linkage
  modified_base 15: mod_base = OTHER; note = 5-methyl beta-D-oxy locked nucleotide with phosphorothioate linkage
  modified_base 16: mod_base = OTHER; note = beta-D-oxy locked nucleotide with phosphorothioate linkage
tgacccttatcataca

SEQ ID NO: 535 - DNA, 17 bp, synthetic construct
  source 1..17: mol_type = other DNA
  modified_base 1: mod_base = OTHER; note = beta-D-oxy locked nucleotide with phosphorothioate linkage
  modified_base 2: mod_base = OTHER; note = 5-methyl beta-D-oxy locked nucleotide with phosphorothioate linkage
  modified_base 3: mod_base = OTHER; note = beta-D-oxy locked nucleotide with phosphorothioate linkage
  modified_base 4: mod_base = OTHER; note = beta-D-oxy locked nucleotide with phosphorothioate linkage
  modified_base 5: mod_base = OTHER; note = Nucleotide with phosphorothioate linkage
  modified_base 6: mod_base = OTHER; note = Nucleotide with phosphorothioate linkage
  modified_base 7: mod_base = OTHER; note = Nucleotide with phosphorothioate linkage
  modified_base 8: mod_base = OTHER; note = Nucleotide with phosphorothioate linkage
  modified_base 9: mod_base = OTHER; note = Nucleotide with phosphorothioate linkage
  modified_base 10: mod_base = OTHER; note = Nucleotide with phosphorothioate linkage
  modified_base 11: mod_base = OTHER; note = Nucleotide with phosphorothioate linkage
  modified_base 12: mod_base = OTHER; note = Nucleotide with phosphorothioate linkage
  modified_base 13: mod_base = OTHER; note = Nucleotide with phosphorothioate linkage
  modified_base 14: mod_base = OTHER; note = beta-D-oxy locked nucleotide with phosphorothioate linkage
  modified_base 15: mod_base = OTHER; note = beta-D-oxy locked nucleotide with phosphorothioate linkage
  modified_base 16: mod_base = OTHER; note = 5-methyl beta-D-oxy locked nucleotide with phosphorothioate linkage
  modified_base 17: mod_base = OTHER; note = beta-D-oxy locked nucleotide with phosphorothioate linkage
actagactctaaaatct

SEQ ID NO: 536 - DNA, 19 bp, synthetic construct
  source 1..19: mol_type = other DNA
  modified_base 1: mod_base = OTHER; note = 5-methyl beta-D-oxy locked nucleotide with phosphorothioate linkage
  modified_base 2: mod_base = OTHER; note = 5-methyl beta-D-oxy locked nucleotide with phosphorothioate linkage
  modified_base 3: mod_base = OTHER; note = Nucleotide with phosphorothioate linkage
  modified_base 4: mod_base = OTHER; note = Nucleotide with phosphorothioate linkage
  modified_base 5: mod_base = OTHER; note = Nucleotide with phosphorothioate linkage
  modified_base 6: mod_base = OTHER; note = Nucleotide with phosphorothioate linkage
  modified_base 7: mod_base = OTHER; note = Nucleotide with phosphorothioate linkage
  modified_base 8: mod_base = OTHER; note = Nucleotide with phosphorothioate linkage
  modified_base 9: mod_base = OTHER; note = Nucleotide with phosphorothioate linkage
  modified_base 10: mod_base = OTHER; note = Nucleotide with phosphorothioate linkage
  modified_base 11: mod_base = OTHER; note = Nucleotide with phosphorothioate linkage
  modified_base 12: mod_base = OTHER; note = Nucleotide with phosphorothioate linkage
  modified_base 13: mod_base = OTHER; note = Nucleotide with phosphorothioate linkage
  modified_base 14: mod_base = OTHER; note = Nucleotide with phosphorothioate linkage
  modified_base 15: mod_base = OTHER; note = Nucleotide with phosphorothioate linkage
  modified_base 16: mod_base = OTHER; note = Nucleotide with phosphorothioate linkage
  modified_base 17: mod_base = OTHER; note = Nucleotide with phosphorothioate linkage
  modified_base 18: mod_base = OTHER; note = 5-methyl beta-D-oxy locked nucleotide with phosphorothioate linkage
  modified_base 19: mod_base = OTHER; note = beta-D-oxy locked nucleotide with phosphorothioate linkage
ccactagactctaaaatct

SEQ ID NO: 537 - DNA, 18 bp, synthetic construct
  source 1..18: mol_type = other DNA
  modified_base 1: mod_base = OTHER; note = 5-methyl beta-D-oxy locked nucleotide with phosphorothioate linkage
  modified_base 2: mod_base = OTHER; note = beta-D-oxy locked nucleotide with phosphorothioate linkage
  modified_base 3: mod_base = OTHER; note = 5-methyl beta-D-oxy locked nucleotide with phosphorothioate linkage
  modified_base 4: mod_base = OTHER; note = Nucleotide with phosphorothioate linkage
  modified_base 5: mod_base = OTHER; note = Nucleotide with phosphorothioate linkage
  modified_base 6: mod_base = OTHER; note = Nucleotide with phosphorothioate linkage
  modified_base 7: mod_base = OTHER; note = Nucleotide with phosphorothioate linkage
  modified_base 8: mod_base = OTHER; note = Nucleotide with phosphorothioate linkage
  modified_base 9: mod_base = OTHER; note = Nucleotide with phosphorothioate linkage
  modified_base 10: mod_base = OTHER; note = Nucleotide with phosphorothioate linkage
  modified_base 11: mod_base = OTHER; note = Nucleotide with phosphorothioate linkage
  modified_base 12: mod_base = OTHER; note = Nucleotide with phosphorothioate linkage
  modified_base 13: mod_base = OTHER; note = Nucleotide with phosphorothioate linkage
  modified_base 14: mod_base = OTHER; note = Nucleotide with phosphorothioate linkage
  modified_base 15: mod_base = OTHER; note = Nucleotide with phosphorothioate linkage
  modified_base 16: mod_base = OTHER; note = Nucleotide with phosphorothioate linkage
  modified_base 17: mod_base = OTHER; note = 5-methyl beta-D-oxy locked nucleotide with phosphorothioate linkage
  modified_base 18: mod_base = OTHER; note = beta-D-oxy locked nucleotide with phosphorothioate linkage
cactagactctaaaatct

SEQ ID NO: 538 - DNA, 17 bp, synthetic construct
  source 1..17: mol_type = other DNA
  modified_base 1: mod_base = OTHER; note = 5-methyl beta-D-oxy locked nucleotide with phosphorothioate linkage
  modified_base 2: mod_base = OTHER; note = beta-D-oxy locked nucleotide with phosphorothioate linkage
  modified_base 3: mod_base = OTHER; note = 5-methyl beta-D-oxy locked nucleotide with phosphorothioate linkage
  modified_base 4: mod_base = OTHER; note = beta-D-oxy locked nucleotide with phosphorothioate linkage
  modified_base 5: mod_base = OTHER; note = Nucleotide with phosphorothioate linkage
  modified_base 6: mod_base = OTHER; note = Nucleotide with phosphorothioate linkage
  modified_base 7: mod_base = OTHER; note = Nucleotide with phosphorothioate linkage
  modified_base 8: mod_base = OTHER; note = Nucleotide with phosphorothioate linkage
  modified_base 9: mod_base = OTHER; note = Nucleotide with phosphorothioate linkage
  modified_base 10: mod_base = OTHER; note = Nucleotide with phosphorothioate linkage
  modified_base 11: mod_base = OTHER; note = Nucleotide with phosphorothioate linkage
  modified_base 12: mod_base = OTHER; note = Nucleotide with phosphorothioate linkage
  modified_base 13: mod_base = OTHER; note = Nucleotide with phosphorothioate linkage
  modified_base 14: mod_base = OTHER; note = beta-D-oxy locked nucleotide with phosphorothioate linkage
  modified_base 15: mod_base = OTHER; note = beta-D-oxy locked nucleotide with phosphorothioate linkage
  modified_base 16: mod_base = OTHER; note = beta-D-oxy locked nucleotide with phosphorothioate linkage
  modified_base 17: mod_base = OTHER; note = 5-methyl beta-D-oxy locked nucleotide with phosphorothioate linkage
cactagactctaaaatc

SEQ ID NO: 539 - DNA, 18 bp, synthetic construct
  source 1..18: mol_type = other DNA
  modified_base 1: mod_base = OTHER; note = 5-methyl beta-D-oxy locked nucleotide with phosphorothioate linkage
  modified_base 2: mod_base = OTHER; note = 5-methyl beta-D-oxy locked nucleotide with phosphorothioate linkage
  modified_base 3: mod_base = OTHER; note = Nucleotide with phosphorothioate linkage
  modified_base 4: mod_base = OTHER; note = Nucleotide with phosphorothioate linkage
  modified_base 5: mod_base = OTHER; note = Nucleotide with phosphorothioate linkage
  modified_base 6: mod_base = OTHER; note = Nucleotide with phosphorothioate linkage
  modified_base 7: mod_base = OTHER; note = Nucleotide with phosphorothioate linkage
  modified_base 8: mod_base = OTHER; note = Nucleotide with phosphorothioate linkage
  modified_base 9: mod_base = OTHER; note = Nucleotide with phosphorothioate linkage
  modified_base 10: mod_base = OTHER; note = Nucleotide with phosphorothioate linkage
  modified_base 11: mod_base = OTHER; note = Nucleotide with phosphorothioate linkage
  modified_base 12: mod_base = OTHER; note = Nucleotide with phosphorothioate linkage
  modified_base 13: mod_base = OTHER; note = Nucleotide with phosphorothioate linkage
  modified_base 14: mod_base = OTHER; note = Nucleotide with phosphorothioate linkage
  modified_base 15: mod_base = OTHER; note = Nucleotide with phosphorothioate linkage
  modified_base 16: mod_base = OTHER; note = Nucleotide with phosphorothioate linkage
  modified_base 17: mod_base = OTHER; note = beta-D-oxy locked nucleotide with phosphorothioate linkage
  modified_base 18: mod_base = OTHER; note = 5-methyl beta-D-oxy locked nucleotide with phosphorothioate linkage
ccactagactctaaaatc

SEQ ID NO: 540 - DNA, 17 bp, synthetic construct
  source 1..17: mol_type = other DNA
  modified_base 1: mod_base = OTHER; note = 5-methyl beta-D-oxy locked nucleotide with phosphorothioate linkage
  modified_base 2: mod_base = OTHER; note = 5-methyl beta-D-oxy locked nucleotide with phosphorothioate linkage
  modified_base 3: mod_base = OTHER; note = beta-D-oxy locked nucleotide with phosphorothioate linkage
  modified_base 4: mod_base = OTHER; note = 5-methyl beta-D-oxy locked nucleotide with phosphorothioate linkage
  modified_base 5: mod_base = OTHER; note = Nucleotide with phosphorothioate linkage
  modified_base 6: mod_base = OTHER; note = Nucleotide with phosphorothioate linkage
  modified_base 7: mod_base = OTHER; note = Nucleotide with phosphorothioate linkage
  modified_base 8: mod_base = OTHER; note = Nucleotide with phosphorothioate linkage
  modified_base 9: mod_base = OTHER; note = Nucleotide with phosphorothioate linkage
  modified_base 10: mod_base = OTHER; note = Nucleotide with phosphorothioate linkage
  modified_base 11: mod_base = OTHER; note = Nucleotide with phosphorothioate linkage
  modified_base 12: mod_base = OTHER; note = Nucleotide with phosphorothioate linkage
  modified_base 13: mod_base = OTHER; note = Nucleotide with phosphorothioate linkage
  modified_base 14: mod_base = OTHER; note = beta-D-oxy locked nucleotide with phosphorothioate linkage
  modified_base 15: mod_base = OTHER; note = beta-D-oxy locked nucleotide with phosphorothioate linkage
  modified_base 16: mod_base = OTHER; note = beta-D-oxy locked nucleotide with phosphorothioate linkage
  modified_base 17: mod_base = OTHER; note = beta-D-oxy locked nucleotide with phosphorothioate linkage
ccactagactctaaaat

SEQ ID NO: 541 - DNA, 17 bp, synthetic construct
  source 1..17: mol_type = other DNA
  modified_base 1: mod_base = OTHER; note = 5-methyl beta-D-oxy locked nucleotide with phosphorothioate linkage
  modified_base 2: mod_base = OTHER; note = beta-D-oxy locked nucleotide with phosphorothioate linkage
  modified_base 3: mod_base = OTHER; note = Nucleotide with phosphorothioate linkage
  modified_base 4: mod_base = OTHER; note = Nucleotide with phosphorothioate linkage
  modified_base 5: mod_base = OTHER; note = Nucleotide with phosphorothioate linkage
  modified_base 6: mod_base = OTHER; note = Nucleotide with phosphorothioate linkage
  modified_base 7: mod_base = OTHER; note = Nucleotide with phosphorothioate linkage
  modified_base 8: mod_base = OTHER; note = Nucleotide with phosphorothioate linkage
  modified_base 9: mod_base = OTHER; note = Nucleotide with phosphorothioate linkage
  modified_base 10: mod_base = OTHER; note = Nucleotide with phosphorothioate linkage
  modified_base 11: mod_base = OTHER; note = Nucleotide with phosphorothioate linkage
  modified_base 12: mod_base = OTHER; note = Nucleotide with phosphorothioate linkage
  modified_base 13: mod_base = OTHER; note = Nucleotide with phosphorothioate linkage
  modified_base 14: mod_base = OTHER; note = Nucleotide with phosphorothioate linkage
  modified_base 15: mod_base = OTHER; note = Nucleotide with phosphorothioate linkage
  modified_base 16: mod_base = OTHER; note = 5-methyl beta-D-oxy locked nucleotide with phosphorothioate linkage
  modified_base 17: mod_base = OTHER; note = 5-methyl beta-D-oxy locked nucleotide with phosphorothioate linkage
cactggcatacatctcc

SEQ ID NO: 542 - DNA, 16 bp, synthetic construct
  source 1..16: mol_type = other DNA
  modified_base 1: mod_base = OTHER; note = beta-D-oxy locked nucleotide with phosphorothioate linkage
  modified_base 2: mod_base = OTHER; note = 5-methyl beta-D-oxy locked nucleotide with phosphorothioate linkage
  modified_base 3: mod_base = OTHER; note = Nucleotide with phosphorothioate linkage
  modified_base 4: mod_base = OTHER; note = Nucleotide with phosphorothioate linkage
  modified_base 5: mod_base = OTHER; note = Nucleotide with phosphorothioate linkage
  modified_base 6: mod_base = OTHER; note = Nucleotide with phosphorothioate linkage
  modified_base 7: mod_base = OTHER; note = Nucleotide with phosphorothioate linkage
  modified_base 8: mod_base = OTHER; note = Nucleotide with phosphorothioate linkage
  modified_base 9: mod_base = OTHER; note = Nucleotide with phosphorothioate linkage
  modified_base 10: mod_base = OTHER; note = Nucleotide with phosphorothioate linkage
  modified_base 11: mod_base = OTHER; note = Nucleotide with phosphorothioate linkage
  modified_base 12: mod_base = OTHER; note = Nucleotide with phosphorothioate linkage
  modified_base 13: mod_base = OTHER; note = Nucleotide with phosphorothioate linkage
  modified_base 14: mod_base = OTHER; note = Nucleotide with phosphorothioate linkage
  modified_base 15: mod_base = OTHER; note = 5-methyl beta-D-oxy locked nucleotide with phosphorothioate linkage
  modified_base 16: mod_base = OTHER; note = 5-methyl beta-D-oxy locked nucleotide with phosphorothioate linkage
actggcatacatctcc

SEQ ID NO: 543 - DNA, 15 bp, synthetic construct
  source 1..15: mol_type = other DNA
  modified_base 1: mod_base = OTHER; note = beta-D-oxy locked nucleotide with phosphorothioate linkage
  modified_base 2: mod_base = OTHER; note = beta-D-oxy locked nucleotide with phosphorothioate linkage
  modified_base 3: mod_base = OTHER; note = Nucleotide with phosphorothioate linkage
  modified_base 4: mod_base = OTHER; note = Nucleotide with phosphorothioate linkage
  modified_base 5: mod_base = OTHER; note = Nucleotide with phosphorothioate linkage
  modified_base 6: mod_base = OTHER; note = Nucleotide with phosphorothioate linkage
  modified_base 7: mod_base = OTHER; note = Nucleotide with phosphorothioate linkage
  modified_base 8: mod_base = OTHER; note = Nucleotide with phosphorothioate linkage
  modified_base 9: mod_base = OTHER; note = Nucleotide with phosphorothioate linkage
  modified_base 10: mod_base = OTHER; note = Nucleotide with phosphorothioate linkage
  modified_base 11: mod_base = OTHER; note = Nucleotide with phosphorothioate linkage
  modified_base 12: mod_base = OTHER; note = Nucleotide with phosphorothioate linkage
  modified_base 13: mod_base = OTHER; note = Nucleotide with phosphorothioate linkage
  modified_base 14: mod_base = OTHER; note = 5-methyl beta-D-oxy locked nucleotide with phosphorothioate linkage
  modified_base 15: mod_base = OTHER; note = 5-methyl beta-D-oxy locked nucleotide with phosphorothioate linkage
aggcgaacctcatcc

SEQ ID NO: 544 - DNA, 17 bp, synthetic construct
  source 1..17: mol_type = other DNA
  modified_base 1: mod_base = OTHER; note = beta-D-oxy locked nucleotide with phosphorothioate linkage
  modified_base 2: mod_base = OTHER; note = 5-methyl beta-D-oxy locked nucleotide with phosphorothioate linkage
  modified_base 3: mod_base = OTHER; note = Nucleotide with phosphorothioate linkage
  modified_base 4: mod_base = OTHER; note = Nucleotide with phosphorothioate linkage
  modified_base 5: mod_base = OTHER; note = Nucleotide with phosphorothioate linkage
  modified_base 6: mod_base = OTHER; note = Nucleotide with phosphorothioate linkage
  modified_base 7: mod_base = OTHER; note = Nucleotide with phosphorothioate linkage
  modified_base 8: mod_base = OTHER; note = Nucleotide with phosphorothioate linkage
  modified_base 9: mod_base = OTHER; note = Nucleotide with phosphorothioate linkage
  modified_base 10: mod_base = OTHER; note = Nucleotide with phosphorothioate linkage
  modified_base 11: mod_base = OTHER; note = Nucleotide with phosphorothioate linkage
  modified_base 12: mod_base = OTHER; note = Nucleotide with phosphorothioate linkage
  modified_base 13: mod_base = OTHER; note = Nucleotide with phosphorothioate linkage
  modified_base 14: mod_base = OTHER; note = Nucleotide with phosphorothioate linkage
  modified_base 15: mod_base = OTHER; note = Nucleotide with phosphorothioate linkage
  modified_base 16: mod_base = OTHER; note = 5-methyl beta-D-oxy locked nucleotide with phosphorothioate linkage
  modified_base 17: mod_base = OTHER; note = beta-D-oxy locked nucleotide with phosphorothioate linkage
actgaccatactccact

SEQ ID NO: 545 - DNA, 17 bp, synthetic construct
  source 1..17: mol_type = other DNA
  modified_base 1: mod_base = OTHER; note = beta-D-oxy locked nucleotide with phosphorothioate linkage
  modified_base 2: mod_base = OTHER; note = beta-D-oxy locked nucleotide with phosphorothioate linkage
  modified_base 3: mod_base = OTHER; note = Nucleotide with phosphorothioate linkage
  modified_base 4: mod_base = OTHER; note = Nucleotide with phosphorothioate linkage
  modified_base 5: mod_base = OTHER; note = Nucleotide with phosphorothioate linkage
  modified_base 6: mod_base = OTHER; note = Nucleotide with phosphorothioate linkage
  modified_base 7: mod_base = OTHER; note = Nucleotide with phosphorothioate linkage
  modified_base 8: mod_base = OTHER; note = Nucleotide with phosphorothioate linkage
  modified_base 9: mod_base = OTHER; note = Nucleotide with phosphorothioate linkage
  modified_base 10: mod_base = OTHER; note = Nucleotide with phosphorothioate linkage
  modified_base 11: mod_base = OTHER; note = Nucleotide with phosphorothioate linkage
  modified_base 12: mod_base = OTHER; note = Nucleotide with phosphorothioate linkage
  modified_base 13: mod_base = OTHER; note = Nucleotide with phosphorothioate linkage
  modified_base 14: mod_base = OTHER; note = Nucleotide with phosphorothioate linkage
  modified_base 15: mod_base = OTHER; note = Nucleotide with phosphorothioate linkage
  modified_base 16: mod_base = OTHER; note = beta-D-oxy locked nucleotide with phosphorothioate linkage
  modified_base 17: mod_base = OTHER; note = 5-methyl beta-D-oxy locked nucleotide with phosphorothioate linkage
gactgaccatactccac

SEQ ID NO: 546 - DNA, 16 bp, synthetic construct
  source 1..16: mol_type = other DNA
  modified_base 1: mod_base = OTHER; note = beta-D-oxy locked nucleotide with phosphorothioate linkage
  modified_base 2: mod_base = OTHER; note = beta-D-oxy locked nucleotide with phosphorothioate linkage
  modified_base 3: mod_base = OTHER; note = 5-methyl beta-D-oxy locked nucleotide with phosphorothioate linkage
  modified_base 4: mod_base = OTHER; note = Nucleotide with phosphorothioate linkage
  modified_base 5: mod_base = OTHER; note = Nucleotide with phosphorothioate linkage
  modified_base 6: mod_base = OTHER; note = Nucleotide with phosphorothioate linkage
  modified_base 7: mod_base = OTHER; note = Nucleotide with phosphorothioate linkage
  modified_base 8: mod_base = OTHER; note = Nucleotide with phosphorothioate linkage
  modified_base 9: mod_base = OTHER; note = Nucleotide with phosphorothioate linkage
  modified_base 10: mod_base = OTHER; note = Nucleotide with phosphorothioate linkage
  modified_base 11: mod_base = OTHER; note = Nucleotide with phosphorothioate linkage
  modified_base 12: mod_base = OTHER; note = Nucleotide with phosphorothioate linkage
  modified_base 13: mod_base = OTHER; note = Nucleotide with phosphorothioate linkage
  modified_base 14: mod_base = OTHER; note = Nucleotide with phosphorothioate linkage
  modified_base 15: mod_base = OTHER; note = 5-methyl beta-D-oxy locked nucleotide with phosphorothioate linkage
  modified_base 16: mod_base = OTHER; note = beta-D-oxy locked nucleotide with phosphorothioate linkage
gactgaccatactcca

SEQ ID NO: 547 - DNA, 15 bp, synthetic construct
  source 1..15: mol_type = other DNA
  modified_base 1: mod_base = OTHER; note = beta-D-oxy locked nucleotide with phosphorothioate linkage
  modified_base 2: mod_base = OTHER; note = beta-D-oxy locked nucleotide with phosphorothioate linkage
  modified_base 3: mod_base = OTHER; note = 5-methyl beta-D-oxy locked nucleotide with phosphorothioate linkage
  modified_base 4: mod_base = OTHER; note = 5-methyl beta-D-oxy locked nucleotide with phosphorothioate linkage
  modified_base 5: mod_base = OTHER; note = Nucleotide with phosphorothioate linkage
  modified_base 6: mod_base = OTHER; note = Nucleotide with phosphorothioate linkage
  modified_base 7: mod_base = OTHER; note = Nucleotide with phosphorothioate linkage
  modified_base 8: mod_base = OTHER; note = Nucleotide with phosphorothioate linkage
  modified_base 9: mod_base = OTHER; note = Nucleotide with phosphorothioate linkage
  modified_base 10: mod_base = OTHER; note = Nucleotide with phosphorothioate linkage
  modified_base 11: mod_base = OTHER; note = Nucleotide with phosphorothioate linkage
  modified_base 12: mod_base = OTHER; note = beta-D-oxy locked nucleotide with phosphorothioate linkage
  modified_base 13: mod_base = OTHER; note = beta-D-oxy locked nucleotide with phosphorothioate linkage
  modified_base 14: mod_base = OTHER; note = beta-D-oxy locked nucleotide with phosphorothioate linkage
  modified_base 15: mod_base = OTHER; note = beta-D-oxy locked nucleotide with phosphorothioate linkage
aaccttaaccgtgaa

SEQ ID NO: 548 - DNA, 15 bp, synthetic construct
  source 1..15: mol_type = other DNA
  modified_base 1: mod_base = OTHER; note = 5-methyl beta-D-oxy locked nucleotide with phosphorothioate linkage
  modified_base 2: mod_base = OTHER; note = beta-D-oxy locked nucleotide with phosphorothioate linkage
  modified_base 3: mod_base = OTHER; note = beta-D-oxy locked nucleotide with phosphorothioate linkage
  modified_base 4: mod_base = OTHER; note = beta-D-oxy locked nucleotide with phosphorothioate linkage
  modified_base 5: mod_base = OTHER; note = Nucleotide with phosphorothioate linkage
  modified_base 6: mod_base = OTHER; note = Nucleotide with phosphorothioate linkage
  modified_base 7: mod_base = OTHER; note = Nucleotide with phosphorothioate linkage
  modified_base 8: mod_base = OTHER; note = Nucleotide with phosphorothioate linkage
  modified_base 9: mod_base = OTHER; note = Nucleotide with phosphorothioate linkage
  modified_base 10: mod_base = OTHER; note = Nucleotide with phosphorothioate linkage
  modified_base 11: mod_base = OTHER; note = Nucleotide with phosphorothioate linkage
  modified_base 12: mod_base = OTHER; note = beta-D-oxy locked nucleotide with phosphorothioate linkage
  modified_base 13: mod_base = OTHER; note = beta-D-oxy locked nucleotide with phosphorothioate linkage
  modified_base 14: mod_base = OTHER; note = 5-methyl beta-D-oxy locked nucleotide with phosphorothioate linkage
  modified_base 15: mod_base = OTHER; note = 5-methyl beta-D-oxy locked nucleotide with phosphorothioate linkage
cgaagaaccttaacc

SEQ ID NO: 549 - DNA, 16 bp, synthetic construct
  source 1..16: mol_type = other DNA
  modified_base 1: mod_base = OTHER; note = beta-D-oxy locked nucleotide with phosphorothioate linkage
  modified_base 2: mod_base = OTHER; note = 5-methyl beta-D-oxy locked nucleotide with phosphorothioate linkage
  modified_base 3: mod_base = OTHER; note = Nucleotide with phosphorothioate linkage
  modified_base 4: mod_base = OTHER; note = Nucleotide with phosphorothioate linkage
  modified_base 5: mod_base = OTHER; note = Nucleotide with phosphorothioate linkage
  modified_base 6: mod_base = OTHER; note = Nucleotide with phosphorothioate linkage
  modified_base 7: mod_base = OTHER; note = Nucleotide with phosphorothioate linkage
  modified_base 8: mod_base = OTHER; note = Nucleotide with phosphorothioate linkage
  modified_base 9: mod_base = OTHER; note = Nucleotide with phosphorothioate linkage
  modified_base 10: mod_base = OTHER; note = Nucleotide with phosphorothioate linkage
  modified_base 11: mod_base = OTHER; note = Nucleotide with phosphorothioate linkage
  modified_base 12: mod_base = OTHER; note = Nucleotide with phosphorothioate linkage
  modified_base 13: mod_base = OTHER; note = beta-D-oxy locked nucleotide with phosphorothioate linkage
  modified_base 14: mod_base = OTHER; note = beta-D-oxy locked nucleotide with phosphorothioate linkage
  modified_base 15: mod_base = OTHER; note = 5-methyl beta-D-oxy locked nucleotide with phosphorothioate linkage
  modified_base 16: mod_base = OTHER; note = 5-methyl beta-D-oxy locked nucleotide with phosphorothioate linkage
tcgaagaaccttaacc

SEQ ID NO: 550 - DNA, 15 bp, synthetic construct
  source 1..15: mol_type = other DNA
  modified_base 1: mod_base = OTHER; note = beta-D-oxy locked nucleotide with phosphorothioate linkage
  modified_base 2: mod_base = OTHER; note = 5-methyl beta-D-oxy locked nucleotide with phosphorothioate linkage
  modified_base 3: mod_base = OTHER; note = beta-D-oxy locked nucleotide with phosphorothioate linkage
  modified_base 4: mod_base = OTHER; note = beta-D-oxy locked nucleotide with phosphorothioate linkage
  modified_base 5: mod_base = OTHER; note = Nucleotide with phosphorothioate linkage
  modified_base 6: mod_base = OTHER; note = Nucleotide with phosphorothioate linkage
  modified_base 7: mod_base = OTHER; note = Nucleotide with phosphorothioate linkage
  modified_base 8: mod_base = OTHER; note = Nucleotide with phosphorothioate linkage
  modified_base 9: mod_base = OTHER; note = Nucleotide with phosphorothioate linkage
  modified_base 10: mod_base = OTHER; note = Nucleotide with phosphorothioate linkage
  modified_base 11: mod_base = OTHER; note = Nucleotide with phosphorothioate linkage
  modified_base 12: mod_base = OTHER; note = beta-D-oxy locked nucleotide with phosphorothioate linkage
  modified_base 13: mod_base = OTHER; note = beta-D-oxy locked nucleotide with phosphorothioate linkage
  modified_base 14: mod_base = OTHER; note = beta-D-oxy locked nucleotide with phosphorothioate linkage
  modified_base 15: mod_base = OTHER; note = 5-methyl beta-D-oxy locked nucleotide with phosphorothioate linkage
tcgaagaaccttaac

SEQ ID NO: 551 - DNA, 16 bp, synthetic construct
  source 1..16: mol_type = other DNA
  modified_base 1: mod_base = OTHER; note = beta-D-oxy locked nucleotide with phosphorothioate linkage
  modified_base 2: mod_base = OTHER; note = beta-D-oxy locked nucleotide with phosphorothioate linkage
  modified_base 3: mod_base = OTHER; note = 5-methyl beta-D-oxy locked nucleotide with phosphorothioate linkage
  modified_base 4: mod_base = OTHER; note = Nucleotide with phosphorothioate linkage
  modified_base 5: mod_base = OTHER; note = Nucleotide with phosphorothioate linkage
  modified_base 6: mod_base = OTHER; note = Nucleotide with phosphorothioate linkage
  modified_base 7: mod_base = OTHER; note = Nucleotide with phosphorothioate linkage
  modified_base 8: mod_base = OTHER; note = Nucleotide with phosphorothioate linkage
  modified_base 9: mod_base = OTHER; note = Nucleotide with phosphorothioate linkage
  modified_base 10: mod_base = OTHER; note = Nucleotide with phosphorothioate linkage
  modified_base 11: mod_base = OTHER; note = Nucleotide with phosphorothioate linkage
  modified_base 12: mod_base = OTHER; note = Nucleotide with phosphorothioate linkage
  modified_base 13: mod_base = OTHER; note = 5-methyl beta-D-oxy locked nucleotide with phosphorothioate linkage
  modified_base 14: mod_base = OTHER; note = beta-D-oxy locked nucleotide with phosphorothioate linkage
  modified_base 15: mod_base = OTHER; note = beta-D-oxy locked nucleotide with phosphorothioate linkage
  modified_base 16: mod_base = OTHER; note = beta-D-oxy locked nucleotide with phosphorothioate linkage
ttctcgaagaacctta

SEQ ID NO: 552 - DNA, 17 bp, synthetic construct
  source 1..17: mol_type = other DNA
  modified_base 1: mod_base = OTHER; note = beta-D-oxy locked nucleotide with phosphorothioate linkage
  modified_base 2: mod_base = OTHER; note = beta-D-oxy locked nucleotide with phosphorothioate linkage
  modified_base 3: mod_base = OTHER; note = beta-D-oxy locked nucleotide with phosphorothioate linkage
  modified_base 4: mod_base = OTHER; note = Nucleotide with phosphorothioate linkage
  modified_base 5: mod_base = OTHER; note = Nucleotide with phosphorothioate linkage
  modified_base 6: mod_base = OTHER; note = Nucleotide with phosphorothioate linkage
  modified_base 7: mod_base = OTHER; note = Nucleotide with phosphorothioate linkage
  modified_base 8: mod_base = OTHER; note = Nucleotide with phosphorothioate linkage
  modified_base 9: mod_base = OTHER; note = Nucleotide with phosphorothioate linkage
  modified_base 10: mod_base = OTHER; note = Nucleotide with phosphorothioate linkage
  modified_base 11: mod_base = OTHER; note = Nucleotide with phosphorothioate linkage
  modified_base 12: mod_base = OTHER; note = Nucleotide with phosphorothioate linkage
  modified_base 13: mod_base = OTHER; note = Nucleotide with phosphorothioate linkage
  modified_base 14: mod_base = OTHER; note = Nucleotide with phosphorothioate linkage
  modified_base 15: mod_base = OTHER; note = Nucleotide with phosphorothioate linkage
  modified_base 16: mod_base = OTHER; note = beta-D-oxy locked nucleotide with phosphorothioate linkage
  modified_base 17: mod_base = OTHER; note = beta-D-oxy locked nucleotide with phosphorothioate linkage
agatttcccatttccaa

SEQ ID NO: 553 - DNA, 18 bp, synthetic construct
  source 1..18: mol_type = other DNA
  modified_base 1: mod_base = OTHER; note = beta-D-oxy locked nucleotide with phosphorothioate linkage
  modified_base 2: mod_base = OTHER; note = beta-D-oxy locked nucleotide with phosphorothioate linkage
  modified_base 3: mod_base = OTHER; note = Nucleotide with phosphorothioate linkage
  modified_base 4: mod_base = OTHER; note = Nucleotide with phosphorothioate linkage
  modified_base 5: mod_base = OTHER; note = Nucleotide with phosphorothioate linkage
  modified_base 6: mod_base = OTHER; note = Nucleotide with phosphorothioate linkage
  modified_base 7: mod_base = OTHER; note = Nucleotide with phosphorothioate linkage
  modified_base 8: mod_base = OTHER; note = Nucleotide with phosphorothioate linkage
  modified_base 9: mod_base = OTHER; note = Nucleotide with phosphorothioate linkage
  modified_base 10: mod_base = OTHER; note = Nucleotide with phosphorothioate linkage
  modified_base 11: mod_base = OTHER; note = Nucleotide with phosphorothioate linkage
  modified_base 12: mod_base = OTHER; note = Nucleotide with phosphorothioate linkage
  modified_base 13: mod_base = OTHER; note = Nucleotide with phosphorothioate linkage
  modified_base 14: mod_base = OTHER; note = Nucleotide with phosphorothioate linkage
  modified_base 15: mod_base = OTHER; note = Nucleotide with phosphorothioate linkage
  modified_base 16: mod_base = OTHER; note = Nucleotide with phosphorothioate linkage
  modified_base 17: mod_base = OTHER; note = beta-D-oxy locked nucleotide with phosphorothioate linkage
  modified_base 18: mod_base = OTHER; note = beta-D-oxy locked nucleotide with phosphorothioate linkage
gagatttcccatttccaa

SEQ ID NO: 554 - DNA, 17 bp, synthetic construct
  source 1..17: mol_type = other DNA
  modified_base 1: mod_base = OTHER; note = beta-D-oxy locked nucleotide with phosphorothioate linkage
  modified_base 2: mod_base = OTHER; note = beta-D-oxy locked nucleotide with phosphorothioate linkage
  modified_base 3: mod_base = OTHER; note = Nucleotide with phosphorothioate linkage
  modified_base 4: mod_base = OTHER; note = Nucleotide with phosphorothioate linkage
  modified_base 5: mod_base = OTHER; note = Nucleotide with phosphorothioate linkage
  modified_base 6: mod_base = OTHER; note = Nucleotide with phosphorothioate linkage
  modified_base 7: mod_base = OTHER; note = Nucleotide with phosphorothioate linkage
  modified_base 8: mod_base = OTHER; note = Nucleotide with phosphorothioate linkage
  modified_base 9: mod_base = OTHER; note = Nucleotide with phosphorothioate linkage
  modified_base 10: mod_base = OTHER; note = Nucleotide with phosphorothioate linkage
  modified_base 11: mod_base = OTHER; note = Nucleotide with phosphorothioate linkage
  modified_base 12: mod_base = OTHER; note = Nucleotide with phosphorothioate linkage
  modified_base 13: mod_base = OTHER; note = Nucleotide with phosphorothioate linkage
  modified_base 14: mod_base = OTHER; note = Nucleotide with phosphorothioate linkage
  modified_base 15: mod_base = OTHER; note = Nucleotide with phosphorothioate linkage
  modified_base 16: mod_base = OTHER; note = 5-methyl beta-D-oxy locked nucleotide with phosphorothioate linkage
  modified_base 17: mod_base = OTHER; note = beta-D-oxy locked nucleotide with phosphorothioate linkage
gagatttcccatttcca

SEQ ID NO: 555 - DNA, 16 bp, synthetic construct
  source 1..16: mol_type = other DNA
  modified_base 1: mod_base = OTHER; note = beta-D-oxy locked nucleotide with phosphorothioate linkage
  modified_base 2: mod_base = OTHER; note = 5-methyl beta-D-oxy locked nucleotide with phosphorothioate linkage
  modified_base 3: mod_base = OTHER; note = Nucleotide with phosphorothioate linkage
  modified_base 4: mod_base = OTHER; note = Nucleotide with phosphorothioate linkage
  modified_base 5: mod_base = OTHER; note = Nucleotide with phosphorothioate linkage
  modified_base 6: mod_base = OTHER; note = Nucleotide with phosphorothioate linkage
  modified_base 7: mod_base = OTHER; note = Nucleotide with phosphorothioate linkage
  modified_base 8: mod_base = OTHER; note = Nucleotide with phosphorothioate linkage
  modified_base 9: mod_base = OTHER; note = Nucleotide with phosphorothioate linkage
  modified_base 10: mod_base = OTHER; note = Nucleotide with phosphorothioate linkage
  modified_base 11: mod_base = OTHER; note = Nucleotide with phosphorothioate linkage
  modified_base 12: mod_base = OTHER; note = Nucleotide with phosphorothioate linkage
  modified_base 13: mod_base = OTHER; note = Nucleotide with phosphorothioate linkage
  modified_base 14: mod_base = OTHER; note = beta-D-oxy locked nucleotide with phosphorothioate linkage
  modified_base 15: mod_base = OTHER; note = beta-D-oxy locked nucleotide with phosphorothioate linkage
  modified_base 16: mod_base = OTHER; note = beta-D-oxy locked nucleotide with phosphorothioate linkage
acttgttgctcactat

SEQ ID NO: 556 - DNA, 16 bp, synthetic construct
  source 1..16: mol_type = other DNA
  modified_base 1: mod_base = OTHER; note = 5-methyl beta-D-oxy locked nucleotide with phosphorothioate linkage
  modified_base 2: mod_base = OTHER; note = 5-methyl beta-D-oxy locked nucleotide with phosphorothioate linkage
  modified_base 3: mod_base = OTHER; note = beta-D-oxy locked nucleotide with phosphorothioate linkage
  modified_base 4: mod_base = OTHER; note = Nucleotide with phosphorothioate linkage
  modified_base 5: mod_base = OTHER; note = Nucleotide with phosphorothioate linkage
  modified_base 6: mod_base = OTHER; note = Nucleotide with phosphorothioate linkage
  modified_base 7: mod_base = OTHER; note = Nucleotide with phosphorothioate linkage
  modified_base 8: mod_base = OTHER; note = Nucleotide with phosphorothioate linkage
  modified_base 9: mod_base = OTHER; note = Nucleotide with phosphorothioate linkage
  modified_base 10: mod_base = OTHER; note = Nucleotide with phosphorothioate linkage
  modified_base 11: mod_base = OTHER; note = Nucleotide with phosphorothioate linkage
  modified_base 12: mod_base = OTHER; note = Nucleotide with phosphorothioate linkage
  modified_base 13: mod_base = OTHER; note = Nucleotide with phosphorothioate linkage
  modified_base 14: mod_base = OTHER; note = Nucleotide with phosphorothioate linkage
  modified_base 15: mod_base = OTHER; note = beta-D-oxy locked nucleotide with phosphorothioate linkage
  modified_base 16: mod_base = OTHER; note = beta-D-oxy locked nucleotide with phosphorothioate linkage
ccatccccatgatcaa

SEQ ID NO: 557 - DNA, 19 bp, synthetic construct
  source 1..19: mol_type = other DNA
  modified_base 1: mod_base = OTHER; note = 5-methyl beta-D-oxy locked nucleotide with phosphorothioate linkage
  modified_base 2: mod_base = OTHER; note = beta-D-oxy locked nucleotide with phosphorothioate linkage
  modified_base 3: mod_base = OTHER; note = beta-D-oxy locked nucleotide with phosphorothioate linkage
  modified_base 4: mod_base = OTHER; note = Nucleotide with phosphorothioate linkage
  modified_base 5: mod_base = OTHER; note = Nucleotide with phosphorothioate linkage
  modified_base 6: mod_base = OTHER; note = Nucleotide with phosphorothioate linkage
  modified_base 7: mod_base = OTHER; note = Nucleotide with phosphorothioate linkage
  modified_base 8: mod_base = OTHER; note = Nucleotide with phosphorothioate linkage
  modified_base 9: mod_base = OTHER; note = Nucleotide with phosphorothioate linkage
  modified_base 10: mod_base = OTHER; note = Nucleotide with phosphorothioate linkage
  modified_base 11: mod_base = OTHER; note = Nucleotide with phosphorothioate linkage
  modified_base 12: mod_base = OTHER; note = Nucleotide with phosphorothioate linkage
  modified_base 13: mod_base = OTHER; note = Nucleotide with phosphorothioate linkage
  modified_base 14: mod_base = OTHER; note = Nucleotide with phosphorothioate linkage
  modified_base 15: mod_base = OTHER; note = Nucleotide with phosphorothioate linkage
  modified_base 16: mod_base = OTHER; note = Nucleotide with phosphorothioate linkage
  modified_base 17: mod_base = OTHER; note = Nucleotide with phosphorothioate linkage
  modified_base 18: mod_base = OTHER; note = 5-methyl beta-D-oxy locked nucleotide with phosphorothioate linkage
  modified_base 19: mod_base = OTHER; note = beta-D-oxy locked nucleotide with phosphorothioate linkage
cttttcttttatttaccct

SEQ ID NO: 558 - DNA, 18 bp, synthetic construct
  source 1..18: mol_type = other DNA
  modified_base 1: mod_base = OTHER; note = beta-D-oxy locked nucleotide with phosphorothioate linkage
  modified_base 2: mod_base = OTHER; note = beta-D-oxy locked nucleotide with phosphorothioate linkage
  modified_base 3: mod_base = OTHER; note = beta-D-oxy locked nucleotide with phosphorothioate linkage
  modified_base 4: mod_base = OTHER; note = Nucleotide with phosphorothioate linkage
  modified_base 5: mod_base = OTHER; note = Nucleotide with phosphorothioate linkage
  modified_base 6: mod_base = OTHER; note = Nucleotide with phosphorothioate linkage
  modified_base 7: mod_base = OTHER; note = Nucleotide with phosphorothioate linkage
  modified_base 8: mod_base = OTHER; note = Nucleotide with phosphorothioate linkage
  modified_base 9: mod_base = OTHER; note = Nucleotide with phosphorothioate linkage
  modified_base 10: mod_base = OTHER; note = Nucleotide with phosphorothioate linkage
  modified_base 11: mod_base = OTHER; note = Nucleotide with phosphorothioate linkage
  modified_base 12: mod_base = OTHER; note = Nucleotide with phosphorothioate linkage
  modified_base 13: mod_base = OTHER; note = Nucleotide with phosphorothioate linkage
  modified_base 14: mod_base = OTHER; note = Nucleotide with phosphorothioate linkage
  modified_base 15: mod_base = OTHER; note = Nucleotide with phosphorothioate linkage
  modified_base 16: mod_base = OTHER; note = Nucleotide with phosphorothioate linkage
  modified_base 17: mod_base = OTHER; note = 5-methyl beta-D-oxy locked nucleotide with phosphorothioate linkage
  modified_base 18: mod_base = OTHER; note = beta-D-oxy locked nucleotide with phosphorothioate linkage
ttttcttttatttaccct

SEQ ID NO: 559 - DNA, 19 bp, synthetic construct
  source 1..19: mol_type = other DNA
  modified_base 1: mod_base = OTHER; note = beta-D-oxy locked nucleotide with phosphorothioate linkage
  modified_base 2: mod_base = OTHER; note = 5-methyl beta-D-oxy locked nucleotide with phosphorothioate linkage
  modified_base 3: mod_base = OTHER; note = Nucleotide with phosphorothioate linkage
  modified_base 4: mod_base = OTHER; note = Nucleotide with phosphorothioate linkage
  modified_base 5: mod_base = OTHER; note = Nucleotide with phosphorothioate linkage
  modified_base 6: mod_base = OTHER; note = Nucleotide with phosphorothioate linkage
  modified_base 7: mod_base = OTHER; note = Nucleotide with phosphorothioate linkage
  modified_base 8: mod_base = OTHER; note = Nucleotide with phosphorothioate linkage
  modified_base 9: mod_base = OTHER; note = Nucleotide with phosphorothioate linkage
  modified_base 10: mod_base = OTHER; note = Nucleotide with phosphorothioate linkage
  modified_base 11: mod_base = OTHER; note = Nucleotide with phosphorothioate linkage
  modified_base 12: mod_base = OTHER; note = Nucleotide with phosphorothioate linkage
  modified_base 13: mod_base = OTHER; note = Nucleotide with phosphorothioate linkage
  modified_base 14: mod_base = OTHER; note = Nucleotide with phosphorothioate linkage
  modified_base 15: mod_base = OTHER; note = Nucleotide with phosphorothioate linkage
  modified_base 16: mod_base = OTHER; note = Nucleotide with phosphorothioate linkage
  modified_base 17: mod_base = OTHER; note = Nucleotide with phosphorothioate linkage
  modified_base 18: mod_base = OTHER; note = 5-methyl beta-D-oxy locked nucleotide with phosphorothioate linkage
  modified_base 19: mod_base = OTHER; note = 5-methyl beta-D-oxy locked nucleotide with phosphorothioate linkage
gcttttcttttatttaccc

SEQ ID NO: 560 - DNA, 18 bp, synthetic construct
  source 1..18: mol_type = other DNA
  modified_base 1: mod_base = OTHER; note = 5-methyl beta-D-oxy locked nucleotide with phosphorothioate linkage
  modified_base 2: mod_base = OTHER; note = beta-D-oxy locked nucleotide with phosphorothioate linkage
  modified_base 3: mod_base = OTHER; note = Nucleotide with phosphorothioate linkage
  modified_base 4: mod_base = OTHER; note = Nucleotide with phosphorothioate linkage
  modified_base 5: mod_base = OTHER; note = Nucleotide with phosphorothioate linkage
  modified_base 6: mod_base = OTHER; note = Nucleotide with phosphorothioate linkage
  modified_base 7: mod_base = OTHER; note = Nucleotide with phosphorothioate linkage
  modified_base 8: mod_base = OTHER; note = Nucleotide with phosphorothioate linkage
  modified_base 9: mod_base = OTHER; note = Nucleotide with phosphorothioate linkage
  modified_base 10: mod_base = OTHER; note = Nucleotide with phosphorothioate linkage
  modified_base 11: mod_base = OTHER; note = Nucleotide with phosphorothioate linkage
  modified_base 12: mod_base = OTHER; note = Nucleotide with phosphorothioate linkage
  modified_base 13: mod_base = OTHER; note = Nucleotide with phosphorothioate linkage
  modified_base 14: mod_base = OTHER; note = Nucleotide with phosphorothioate linkage
  modified_base 15: mod_base = OTHER; note = Nucleotide with phosphorothioate linkage
  modified_base 16: mod_base = OTHER; note = Nucleotide with phosphorothioate linkage
  modified_base 17: mod_base = OTHER; note = 5-methyl beta-D-oxy locked nucleotide with phosphorothioate linkage
  modified_base 18: mod_base = OTHER; note = 5-methyl beta-D-oxy locked nucleotide with phosphorothioate linkage
cttttcttttatttaccc

SEQ ID NO: 561 - DNA, 20 bp, synthetic construct
  source 1..20: mol_type = other DNA
  modified_base 1: mod_base = OTHER; note = beta-D-oxy locked nucleotide with phosphorothioate linkage
  modified_base 2: mod_base = OTHER; note = beta-D-oxy locked nucleotide with phosphorothioate linkage
  modified_base 3: mod_base = OTHER; note = Nucleotide with phosphorothioate linkage
  modified_base 4: mod_base = OTHER; note = Nucleotide with phosphorothioate linkage
  modified_base 5: mod_base = OTHER; note = Nucleotide with phosphorothioate linkage
  modified_base 6: mod_base = OTHER; note = Nucleotide with phosphorothioate linkage
  modified_base 7: mod_base = OTHER; note = Nucleotide with phosphorothioate linkage
  modified_base 8: mod_base = OTHER; note = Nucleotide with phosphorothioate linkage
  modified_base 9: mod_base = OTHER; note = Nucleotide with phosphorothioate linkage
  modified_base 10: mod_base = OTHER; note = Nucleotide with phosphorothioate linkage
  modified_base 11: mod_base = OTHER; note = Nucleotide with phosphorothioate linkage
  modified_base 12: mod_base = OTHER; note = Nucleotide with phosphorothioate linkage
  modified_base 13: mod_base = OTHER; note = Nucleotide with phosphorothioate linkage
  modified_base 14: mod_base = OTHER; note = Nucleotide with phosphorothioate linkage
  modified_base 15: mod_base = OTHER; note = Nucleotide with phosphorothioate linkage
  modified_base 16: mod_base = OTHER; note = Nucleotide with phosphorothioate linkage
  modified_base 17: mod_base = OTHER; note = Nucleotide with phosphorothioate linkage
  modified_base 18: mod_base = OTHER; note = Nucleotide with phosphorothioate linkage
  modified_base 19: mod_base = OTHER; note = 5-methyl beta-D-oxy locked nucleotide with phosphorothioate linkage
  modified_base 20: mod_base = OTHER; note = 5-methyl beta-D-oxy locked nucleotide with phosphorothioate linkage
aagcttttcttttatttacc

SEQ ID NO: 562 - DNA, 18 bp, synthetic construct
  source 1..18: mol_type = other DNA
  modified_base 1: mod_base = OTHER; note = beta-D-oxy locked nucleotide with phosphorothioate linkage
  modified_base 2: mod_base = OTHER; note = 5-methyl beta-D-oxy locked nucleotide with phosphorothioate linkage
  modified_base 3: mod_base = OTHER; note = Nucleotide with phosphorothioate linkage
  modified_base 4: mod_base = OTHER; note = Nucleotide with phosphorothioate linkage
  modified_base 5: mod_base = OTHER; note = Nucleotide with phosphorothioate linkage
  modified_base 6: mod_base = OTHER; note = Nucleotide with phosphorothioate linkage
  modified_base 7: mod_base = OTHER; note = Nucleotide with phosphorothioate linkage
  modified_base 8: mod_base = OTHER; note = Nucleotide with phosphorothioate linkage
  modified_base 9: mod_base = OTHER; note = Nucleotide with phosphorothioate linkage
  modified_base 10: mod_base = OTHER; note = Nucleotide with phosphorothioate linkage
  modified_base 11: mod_base = OTHER; note = Nucleotide with phosphorothioate linkage
  modified_base 12: mod_base = OTHER; note = Nucleotide with phosphorothioate linkage
  modified_base 13: mod_base = OTHER; note = Nucleotide with phosphorothioate linkage
  modified_base 14: mod_base = OTHER; note = Nucleotide with phosphorothioate linkage
  modified_base 15: mod_base = OTHER; note = Nucleotide with phosphorothioate linkage
  modified_base 16: mod_base = OTHER; note = Nucleotide with phosphorothioate linkage
  modified_base 17: mod_base = OTHER; note = 5-methyl beta-D-oxy locked nucleotide with phosphorothioate linkage
  modified_base 18: mod_base = OTHER; note = 5-methyl beta-D-oxy locked nucleotide with phosphorothioate linkage
gcttttcttttatttacc

SEQ ID NO: 563 - DNA, 19 bp, synthetic construct
  source 1..19: mol_type = other DNA
  modified_base 1: mod_base = OTHER; note = beta-D-oxy locked nucleotide with phosphorothioate linkage
  modified_base 2: mod_base = OTHER; note = beta-D-oxy locked nucleotide with phosphorothioate linkage
  modified_base 3: mod_base = OTHER; note = Nucleotide with phosphorothioate linkage
  modified_base 4: mod_base = OTHER; note = Nucleotide with phosphorothioate linkage
  modified_base 5: mod_base = OTHER; note = Nucleotide with phosphorothioate linkage
  modified_base 6: mod_base = OTHER; note = Nucleotide with phosphorothioate linkage
  modified_base 7: mod_base = OTHER; note = Nucleotide with phosphorothioate linkage
  modified_base 8: mod_base = OTHER; note = Nucleotide with phosphorothioate linkage
  modified_base 9: mod_base = OTHER; note = Nucleotide with phosphorothioate linkage
  modified_base 10: mod_base = OTHER; note = Nucleotide with phosphorothioate linkage
  modified_base 11: mod_base = OTHER; note = Nucleotide with phosphorothioate linkage
  modified_base 12: mod_base = OTHER; note = Nucleotide with phosphorothioate linkage
  modified_base 13: mod_base = OTHER; note = Nucleotide with phosphorothioate linkage
  modified_base 14: mod_base = OTHER; note = Nucleotide with phosphorothioate linkage
  modified_base 15: mod_base = OTHER; note = Nucleotide with phosphorothioate linkage
  modified_base 16: mod_base = OTHER; note = Nucleotide with phosphorothioate linkage
  modified_base 17: mod_base = OTHER; note = beta-D-oxy locked nucleotide with phosphorothioate linkage
  modified_base 18: mod_base = OTHER; note = 5-methyl beta-D-oxy locked nucleotide with phosphorothioate linkage
  modified_base 19: mod_base = OTHER; note = 5-methyl beta-D-oxy locked nucleotide with phosphorothioate linkage
agcttttcttttatttacc
